(19) United States
(12) Patent Application Publication
(10) Pub. No.: US 2023/0340446 A1
(43) Pub. Date: Oct. 26, 2023

(54) BIOSYNTHESIS OF CANNABINOIDS AND CANNABINOID PRECURSORS

(71) Applicant: Ginkgo Bioworks, Inc., Boston, MA (US)

(72) Inventors: Kim Cecelia Anderson, Somerville, MA (US); Brian Carvalho, Somerville, MA (US); Nicholas Flores, Boston, MA (US); Seth Ritter, Boston, MA (US); Gabriel Rodriguez, Central, SC (US); Michelle Spencer, Boston, MA (US); Emily E. Wrenbeck, Boston, MA (US)

(73) Assignee: Ginkgo Bioworks, Inc., Boston, MA (US)

(21) Appl. No.: 18/010,666

(22) PCT Filed: Jun. 17, 2021
(86) PCT No.: PCT/US2021/037954

§ 371 Date: Dec. 15, 2022

Related U.S. Application Data
(60) Provisional application No. 63/040,458, filed on Jun. 17, 2020.
(60) Provisional application No. 63/192,476, filed on May 24, 2021.

(51) Int. Cl. C12N 9/88; C12P 7/42

(52) U.S. Cl. CPC C12N 9/88; C12P 7/42; C12Y 404/01026

(57) ABSTRACT

Aspects of the disclosure relate to biosynthesis of cannabinoids and cannabinoid precursors in recombinant cells and in vitro. In particular, the disclosure relates to variants of olivetolic acid cyclase.

### CROSS REFERENCE TO RELATED APPLICATIONS

[0001] This application claims the benefit under 35 U.S.C. § 119(e) of U.S. Provisional Application No. 63/040,458, filed Jun. 17, 2020, entitled “BIOSYNTHESIS OF CANNABINOIDS AND CANNABINOID PRECURSORS” and U.S. Provisional Application No. 63/192,476, filed May 24, 2021, entitled “BIOSYNTHESIS OF CANNABINOIDS AND CANNABINOID PRECURSORS” the entire disclosure of each of which is hereby incorporated by reference in its entirety.

### REFERENCE TO A SEQUENCE LISTING SUBMITTED AS A TEXT FILE VIA EFS-WEB

[0002] The instant application contains a Sequence Listing which has been submitted in ASCII format via EFS-Web and is hereby incorporated by reference in its entirety. The ASCII file, created on Jun. 17, 2021, is named G091970052W000-SEQ-FL.TXT and is 1,058,904 bytes in size.

### FIELD OF INVENTION

[0003] The present disclosure relates to the biosynthesis of cannabinoids and cannabinoid precursors, such as in recombinant cells.

### BACKGROUND

[0004] Cannabinoids are chemical compounds that may act as ligands for endocannabinoid receptors and have multiple medical applications. Traditionally, cannabinoids have been isolated from plants of the genus Cannabis. The use of plants for producing cannabinoids is inefficient, however, with isolated products often limited to the two most prevalent endogenous cannabinoids, THC and CBD, as minor cannabinoids are typically produced in very low concentrations in Cannabis plants. Further, the cultivation of Cannabis plants is restricted in many jurisdictions. In addition, in order to obtain consistent results, Cannabis plants are often grown in a controlled environment, such as indoor grow rooms without windows, to provide flexibility in modulating growing conditions such as lighting, temperature, humidity, airflow, etc. Growing Cannabis plants in such controlled environments can result in high energy usage per gram of cannabinoid produced, especially for minor cannabinoids that the plants produce only in small amounts. For example, lighting in such grow rooms is provided by artificial sources, such as high-powered sodium lights. As many species of Cannabis have a vegetative cycle that requires 18 or more hours of light per day, powering such lights can result in significant energy expenditures. It has been estimated that between 0.88-1.34 kWh of energy is required to produce one gram of THC in dried Cannabis flower form (e.g., before any extraction or purification). Additionally, concern has been raised over agricultural practices in certain jurisdictions, such as California, where the growing season coincides with the dry season such that the water usage may impact connected surface water in streams (Dillis, Christopher, Connor McIntee, Van Butsic, Lance Le, Kason Grady, and Theodore Grantham. “Water storage and irrigation practices for cannabis drive seasonal patterns of water extraction and use in Northern California.” Journal of Environmental Management 272 (2020): 110955).

[0005] Cannabinoids can also be produced through chemical synthesis (see, e.g., U.S. Pat. No. 7,323,576 to Souza et al). However, such methods suffer from low yields and high cost.

[0006] Production of cannabinoids, cannabinoid analogs, and cannabinoid precursors using engineered organisms may provide an advantageous approach to meet the increasing demand for these compounds.

### SUMMARY

[0007] Aspects of the present disclosure provide methods for production of cannabinoids and cannabinoid precursors from fatty acid substrates using genetically modified host cells.

[0008] Aspects of the disclosure relate to host cells that comprise a heterologous polynucleotide encoding a polyketide cyclase (PKC), wherein the PKC comprises an amino acid deletion or substitution at one or more residues corresponding to position 2, 3, 13, 17, 18, 19, 20, 21, 22, 24, 25, 26, 28, 29, 31, 33, 37, 38, 39, 41, 45, 46, 48, 49, 50, 52, 53, 55, 56, 57, 59, 60, 61, 62, 64, 65, 66, 67, 68, 69, 70, 71, 73, 74, 80, 81, 82, 83, 84, 85, 86, 87, 88, 89, 94, 95, 97, 98, 100, and/or 101 in SEQ ID NO: 1.

[0009] In some embodiments, the PKC comprises: the amino acid G at a residue corresponding to position 2 in SEQ ID NO: 1 or a deletion of a residue corresponding to position 2 in SEQ ID NO: 1; the amino acid M or Y at a residue corresponding to position 3 in SEQ ID NO: 1; the amino acid R or K at a residue corresponding to position 13 in SEQ ID NO: 1; the amino acid N at a residue corresponding to position 17 in SEQ ID NO: 1; the amino acid D or R at a residue corresponding to position 18 in SEQ ID NO: 1; the amino acid E or D at a residue corresponding to position 19 in SEQ ID NO: 1; the amino acid A at a residue corresponding to position 20 in SEQ ID NO: 1; the amino acid K at a residue corresponding to position 21 in SEQ ID NO: 1; the amino acid T or K at a residue corresponding to position 22 in SEQ ID NO: 1; the amino acid M at a residue corresponding to position 24 in SEQ ID NO: 1; the amino acid A or N at a residue corresponding to position 25 in SEQ ID NO: 1; the amino acid H, R, A, or E at a residue corresponding to position 26 in SEQ ID NO: 1; the amino acid A, S, E, or H at a residue corresponding to position 28 in SEQ ID NO: 1; the amino acid D, S, E, or T at a residue corresponding to position 29 in SEQ ID NO: 1; the amino acid L or A at a residue corresponding to position 31 in SEQ ID NO: 1; the amino acid H, R, D, E, K, Q, or N at a residue corresponding to position 33 in SEQ ID NO: 1; the amino acid L at a residue corresponding to position 37 in SEQ ID NO: 1; the amino acid L at a residue corresponding to position 38 in SEQ ID NO: 1; the amino acid G, S, or Q at a residue corresponding to position 39 in SEQ ID NO: 1; the amino acid K or R at a residue corresponding to position 41 in SEQ ID NO: 1; the amino acid I at a residue corresponding to position 45 in SEQ ID NO: 1; the amino acid F at a residue corresponding to position 46 in SEQ ID NO: 1; the amino acid A at a residue corresponding to position 48 in SEQ ID NO: 1; the amino acid Q at a residue corresponding to position 49 in SEQ ID NO: 1; the amino acid K, F, or W at a residue corresponding to position 50 in SEQ ID NO: 1; the amino acid H at a residue corresponding to position 52 in SEQ ID NO: 1; the amino acid H at a residue corresponding to position 53 in SEQ ID NO: 1; the amino acid F at a residue corresponding to position 55 in SEQ ID NO: 1; the amino acid Y at a residue corresponding to position 56 in SEQ ID NO: 1; the amino acid Y at a residue corresponding to position 57 in SEQ ID NO: 1; the amino acid I or F at a residue corresponding to position 59 in SEQ ID NO: 1; the amino acid I or L at a residue corresponding to position 60 in SEQ ID NO: 1; the amino acid T, D, or S at a residue corresponding to position 61 in SEQ ID NO: 1; the amino acid M at a residue corresponding to position 62 in SEQ ID NO: 1; the amino acid Q or D at a residue corresponding to position 64 in SEQ ID NO: 1; the amino acid N at a residue corresponding to position 65 in SEQ ID NO: 1; the amino acid L, M, or Y at a residue corresponding to position 66 in SEQ ID NO: 1; the amino acid K at a residue corresponding to position 67 in SEQ ID NO: 1; the amino acid E, G, or H at a residue corresponding to position 68 in SEQ ID NO: 1; the amino acid L or Y at a residue corresponding to position 69 in SEQ ID NO: 1; the amino acid A or L at a residue corresponding to position 70 in SEQ ID NO: 1; the amino acid Q, S, or E at a residue corresponding to position 71 in SEQ ID NO: 1; the amino acid L at a residue corresponding to position 73 in SEQ ID NO: 1; the amino acid D, E, H, Q, S, G, or L at a residue corresponding to position 74 in SEQ ID NO: 1; the amino acid V, A, E, S, D, or N at a residue corresponding to position 80 in SEQ ID NO: 1; the amino acid Y at a residue corresponding to position 81 in SEQ ID NO: 1; the amino acid K, V, or R at a residue corresponding to position 82 in SEQ ID NO: 1; the amino acid A, E, G, K, N, Q, R, or S at a residue corresponding to position 83 in SEQ ID NO: 1; the amino acid F, K, M, or Q at a residue corresponding to position 84 in SEQ ID NO: 1; the amino acid A or F at a residue corresponding to position 85 in SEQ ID NO: 1; the amino acid N, G, or S at a residue corresponding to position 86 in SEQ ID NO: 1; the amino acid C, D, or K at a residue corresponding to position 87 in SEQ ID NO: 1; the amino acid Y, N, or S at a residue corresponding to position 88 in SEQ ID NO: 1; the amino acid V or M at a residue corresponding to position 89 in SEQ ID NO: 1; the amino acid V at a residue corresponding to position 94 in SEQ ID NO: 1; the amino acid M or I at a residue corresponding to position 95 in SEQ ID NO: 1; the amino acid F at a residue corresponding to position 97 in SEQ ID NO: 1; the amino acid E, K, or Y at a residue corresponding to position 98 in SEQ ID NO: 1; the amino acid A, G, K, N, Q, or S at a residue corresponding to position 100 in SEQ ID NO: 1; and/or the amino acid A or E at a residue corresponding to position 101 in SEQ ID NO: 1.

[0010] In some embodiments, the PKC comprises an amino acid deletion or substitution at one or more residues corresponding to position 2, 3, 13, 17, 18, 19, 20, 21, 22, 24, 25, 26, 28, 29, 31, 33, 37, 38, 39, 45, 46, 48, 49, 50, 52, 53, 55, 56, 57, 59, 60, 61, 62, 64, 65, 66, 67, 68, 70, 71, 74, 80, 82, 83, 84, 85, 86, 87, 88, 89, 94, 95, 97, 98, 100, and 101 in SEQ ID NO: 1.

[0011] In some embodiments, the PKC comprises: the amino acid G at a residue corresponding to position 2 in SEQ ID NO: 1 or a deletion of a residue corresponding to position 2 in SEQ ID NO: 1; the amino acid Y at a residue corresponding to position 3 in SEQ ID NO: 1; the amino acid R or K at a residue corresponding to position 13 in SEQ ID NO: 1; the amino acid N at a residue corresponding to position 17 in SEQ ID NO: 1; the amino acid D or R at a residue corresponding to position 18 in SEQ ID NO: 1; the amino acid D at a residue corresponding to position 19 in SEQ ID NO: 1; the amino acid A at a residue corresponding to position 20 in SEQ ID NO: 1; the amino acid K at a residue corresponding to position 21 in SEQ ID NO: 1; the amino acid K at a residue corresponding to position 22 in SEQ ID NO: 1; the amino acid M at a residue corresponding to position 24 in SEQ ID NO: 1; the amino acid A or N at a residue corresponding to position 25 in SEQ ID NO: 1; the amino acid H, R, or A at a residue corresponding to position 26 in SEQ ID NO: 1; the amino acid E or H at a residue corresponding to position 28 in SEQ ID NO: 1; the amino acid S, E, or T at a residue corresponding to position 29 in SEQ ID NO: 1; the amino acid L at a residue corresponding to position 31 in SEQ ID NO: 1; the amino acid H, R, N at a residue corresponding to position 33 in SEQ ID NO: 1; the amino acid L at a residue corresponding to position 37 in SEQ ID NO: 1; the amino acid L at a residue corresponding to position 38 in SEQ ID NO: 1; the amino acid G or Q at a residue corresponding to position 39 in SEQ ID NO: 1; the amino acid I at a residue corresponding to position 45 in SEQ ID NO: 1; the amino acid F at a residue corresponding to position 46 in SEQ ID NO: 1; the amino acid A at a residue corresponding to position 48 in SEQ ID NO: 1; the amino acid Q at a residue corresponding to position 49 in SEQ ID NO: 1; the amino acid F, W, or K at a residue corresponding to position 50 in SEQ ID NO: 1; the amino acid H at a residue corresponding to position 52 in SEQ ID NO: 1; the amino acid H at a residue corresponding to position 53 in SEQ ID NO: 1; the amino acid F at a residue corresponding to position 55 in SEQ ID NO: 1; the amino acid Y at a residue corresponding to position 56 in SEQ ID NO: 1; the amino acid Y at a residue corresponding to position 57 in SEQ ID NO: 1; the amino acid F at a residue corresponding to position 59 in SEQ ID NO: 1; the amino acid I or L at a residue corresponding to position 60 in SEQ ID NO: 1; the amino acid D, S, or T at a residue corresponding to position 61 in SEQ ID NO: 1; the amino acid M at a residue corresponding to position 62 in SEQ ID NO: 1; the amino acid D at a residue corresponding to position 64 in SEQ ID NO: 1; the amino acid N at a residue corresponding to position 65 in SEQ ID NO: 1; the amino acid Y at a residue corresponding to position 66 in SEQ ID NO: 1; the amino acid K at a residue corresponding to position 67 in SEQ ID NO: 1; the amino acid G or H at a residue corresponding to position 68 in SEQ ID NO: 1; the amino acid A or L at a residue corresponding to position 70 in SEQ ID NO: 1; the amino acid Q, S, or E at a residue corresponding to position 71 in SEQ ID NO: 1; the amino acid G at a residue corresponding to position 74 in SEQ ID NO: 1; the amino acid V, A, D, or N at a residue corresponding to position 80 in SEQ ID NO: 1; the amino acid K or R at a residue corresponding to position 82 in SEQ ID NO: 1; the amino acid A, E, G, K, N, Q, R, or S at a residue corresponding to position 83 in SEQ ID NO: 1; the amino acid F or K at a residue corresponding to position 84 in SEQ ID NO: 1; the amino acid A or F at a residue corresponding to position 85 in SEQ ID NO: 1; the amino acid S at a residue corresponding to position 86 in SEQ ID NO: 1; the amino acid C or K at a residue corresponding to position 87 in SEQ ID NO: 1; the amino acid Y, N, or S at a residue corresponding to position 88 in SEQ ID NO: 1; the amino acid M at a residue corresponding to position 89 in SEQ ID NO: 1; the amino acid V at a residue corresponding to position 94 in SEQ ID NO: 1; the amino acid M or I at a residue corresponding to position 95 in SEQ ID NO: 1; the amino acid F at a residue corresponding to position 97 in SEQ ID NO: 1; the amino acid E, K, or Y at a residue corresponding to position 98 in SEQ ID NO: 1; the amino acid A, G, K, N, Q, or S at a residue corresponding to position 100 in SEQ ID NO: 1; and/or the amino acid A or E at a residue corresponding to position 101 in SEQ ID NO: 1.

[0012] In some embodiments, the PKC comprises an amino acid substitution at a residue corresponding to position 2, 3, 13, 17, 18, 19, 20, 21, 22, 25, 26, 28, 29, 31, 33, 37, 38, 39, 41, 45, 50, 52, 53, 55, 56, 57, 60, 62, 64, 65, 67, 68, 70, 71, 74, 83, 84, 85, 86, 87, 88, 95, 97, 98, 100, and/or 101 in SEQ ID NO: 1 wherein the PKC is capable of producing olivetolic acid from 3,5,7-trioxododecanoyl-CoA, and wherein, if present: the amino acid substitution at the residue corresponding to position 13 is D13R or D13K; the amino acid substitution at the residue corresponding to position 21 is E21K; the amino acid substitution at the residue corresponding to position 39 is D39G, D39S, or D39Q; the amino acid substitution at the residue corresponding to position 50 is N50K; the amino acid substitution at the residue corresponding to position 52 is E52H; the amino acid substitution at the residue corresponding to position 67 is E67K; the amino acid substitution at the residue corresponding to position 70 is Q70A or Q70L; the amino acid substitution at the residue corresponding to position 71 is D71Q or D71S; the amino acid substitution at the residue corresponding to position 74 is I74D, 174E, I74H, or I74Q; the amino acid substitution at the residue corresponding to position 83 is D83A or D83G; the amino acid substitution at the residue corresponding to position 86 is R86G; the amino acid substitution at the residue corresponding to position 87 is S87D or S87K; and the amino acid substitution at the residue corresponding to position 100 is R100A, R100G, R100K, R100N, R100Q, or R100S.

[0013] In some embodiments, the PKC comprises an amino acid substitution at a residue corresponding to position 2, 3, 13, 17, 18, 19, 20, 21, 22, 25, 26, 28, 29, 31, 33, 37, 38, 39, 45, 50, 52, 53, 55, 56, 57, 60, 62, 64, 65, 67, 68, 70, 71, 83, 84, 85, 87, 88, 95, 97, 98, 100, and/or 101 in SEQ ID NO: 1, and wherein, if present: the amino acid substitution at the residue corresponding to position 13 is D13R or D13K; the amino acid substitution at the residue corresponding to position 21 is E21K; the amino acid substitution at the residue corresponding to position 39 is D39G or D39Q; the amino acid substitution at the residue corresponding to position 50 is N50K; the amino acid substitution at the residue corresponding to position 52 is E52H; the amino acid substitution at the residue corresponding to position 67 is E67K; the amino acid substitution at the residue corresponding to position 70 is Q70A or Q70L; the amino acid substitution at the residue corresponding to position 71 is D71Q or D71S; the amino acid substitution at the residue corresponding to position 83 is D83A or D83G; the amino acid substitution at the residue corresponding to position 87 is S87K; and the amino acid substitution at the residue corresponding to position 100 is R100S.

[0014] In some embodiments, the PKC comprises one or more amino acid substitutions or deletions located in a domain corresponding to: beta sheet 1 (positions 1-11 in SEQ ID NO: 1); loop 1 (positions 12-16 in SEQ ID NO: 1); helix 1 (positions 17-29 in SEQ ID NO: 1); 310 helix 1 (positions 30-32 in SEQ ID NO: 1); loop 2 (positions 33-38 in SEQ ID NO: 1); beta sheet 2 (positions 39-44 in SEQ ID NO: 1); loop 3 (positions 45-56 in SEQ ID NO: 1); beta sheet 3 (positions 57-62 in SEQ ID NO: 1); loop 4 (positions 63-65 in SEQ ID NO: 1); helix 2 (positions 66-73 in SEQ ID NO: 1); turn 1 (positions 74-75 in SEQ ID NO: 1); helix 3 (positions 76-85 in SEQ ID NO: 1); 310 helix 2 (positions 86-88 in SEQ ID NO: 1); beta sheet 4 (positions 89-97 in SEQ ID NO: 1); and/or loop 5 (positions 98-101 in SEQ ID NO: 1).

[0015] In some embodiments, one or more amino acid substitutions are located in a domain corresponding to: helix 1 (positions 17-29 in SEQ ID NO: 1); loop 3 (positions 45-56 in SEQ ID NO: 1); helix 2 (positions 66-73 in SEQ ID NO: 1); and/or helix 3 (positions 76-85 in SEQ ID NO: 1).

[0016] In some embodiments, one or more amino acid substitutions increase the stability of a kinked helix defined by the domains corresponding to helix 2 (positions 66-73 in SEQ ID NO: 1), turn 1 (positions 74-75 in SEQ ID NO: 1), and helix 3 (positions 76-85 in SEQ ID NO: 1) and/or improve conformation of a binding pocket of the PKC to 3,5,7-trioxododecanoyl-CoA and/or olivetolic acid.

[0017] In some embodiments, one or more amino acid substitutions are located in a domain corresponding to: loop 3 (positions 45-56 in SEQ ID NO: 1); helix 2 (positions 66-73 in SEQ ID NO: 1); and helix 3 (positions 76-85 in SEQ ID NO: 1).

[0018] In some embodiments, the PKC comprises a deletion or amino acid substitution at a residue corresponding to position 2, 18, 22, 24, 25, 26, 28, 29, 33, 52, 53, 57, 60, 62, 70, 82, 83, 84, 87, and/or 88 in SEQ ID NO: 1.

[0019] In some embodiments, the PKC comprises an amino acid substitution at a residue corresponding to position 18, 29, 53, 70, 82 and/or 83 in SEQ ID NO:1.

[0020] In some embodiments, the PKC comprises: a deletion at a residue corresponding to position 2 in SEQ ID NO: 1; the amino acid D or R at a residue corresponding to position 18 in SEQ ID NO: 1; the amino acid K at a residue corresponding to position 22 in SEQ ID NO: 1; the amino acid M at a residue corresponding to position 24 in SEQ ID NO: 1; the amino acid N at a residue corresponding to position 25 in SEQ ID NO: 1; the amino acid A or H at a residue corresponding to position 26 in SEQ ID NO: 1; the amino acid E at a residue corresponding to position 28 in SEQ ID NO: 1; the amino acid E or S at a residue corresponding to position 29 in SEQ ID NO: 1; the amino acid H or R at a residue corresponding to position 33 in SEQ ID NO: 1; the amino acid H at a residue corresponding to position 52 in SEQ ID NO: 1; the amino acid H at a residue corresponding to position 53 in SEQ ID NO: 1; the amino acid Y at a residue corresponding to position 57 in SEQ ID NO: 1; the amino acid I at a residue corresponding to position 60 in SEQ ID NO: 1; the amino acid M at a residue corresponding to position 62 in SEQ ID NO: 1; the amino acid L at a residue corresponding to position 70 in SEQ ID NO: 1; the amino acid K at a residue corresponding to position 82 in SEQ ID NO: 1; the amino acid A, K, or R at a residue corresponding to position 83 in SEQ ID NO: 1; the amino acid F or K at a residue corresponding to position 84 in SEQ ID NO: 1; the amino acid C or K at a residue corresponding to position 87 in SEQ ID NO: 1; and/or the amino acid Y at a residue corresponding to position 88 in SEQ ID NO: 1.

[0021] In some embodiments, relative to SEQ ID NO: 1, the PKC comprises: E53H, G82K, and Q70L.

[0022] In some embodiments, relative to SEQ ID NO: 1, the PKC comprises: A18D, T26A, V28E, N29S, E53H, E601, Q70L, G82K, D83A, and S87K; A18D, E22K, N29S, E53H, Q70L, G82K, D83R, S87K, and F88Y; A18D, E22K, N29S, E53H, Q70L, G82K, D83K, S87K, and F88Y; A18D, E22K, N29S, I33R, E53H, Q70L, G82K, D83A, S87K, and F88Y; A18D, E22K, K25N, T26A, N29S, E53H, Q70L, G82K, D83A, and S87K; A18D, E22K, N29S, E53H, Q70L, G82K, D83A, V84K, S87K, and F88Y; A18D, E22K, T26A, N29S, E53H, Q70L, G82K, D83A, S87K, and F88Y; A18D, E22K, T26H, N29S, E53H, Q70L, G82K, D83A, S87K, and F88Y; A18D, E22K, N29S, I33H, E53H, Q70L, G82K, D83A, S87K, and F88Y; A18D, E22K, N29S, E53H, Q70L, G82K, D83A, V84F, S87K, and F88Y; A18D, T26A, N29S, E53H, Q70L, G82K, D83A, and F88Y; A18D, E22K, T26A, N29S, E53H, Q70L, G82K, D83A, and S87K; A18D, T26A, N29S, E53H, Q70L, G82K, D83A, S87K, and F88Y; A18D, T26A, N29S, E53H, Q70L, G82K, and D83A; A18D, E22K, T26A, N29S, E53H, Q70L, G82K, D83A, and F88Y; A18D, E22K, N29S, E53H, Q70L, G82K, D83A, S87K, and F88Y; A18D, T26A, V28E, N29S, E53H, Q70L, G82K, D83A, and S87K; A18R, E22K, N29S, E53H, Q70L, G82K, D83A, S87K, and F88Y; deletion of a residue corresponding to position 2 in SEQ ID NO: 1, A18D, E22K, N29S, E53H, Q70L, G82K, D83A, S87K, and F88Y; A18D, E22K, N29S, E53H, T62M, Q70L, G82K, D83A, S87K, and F88Y; A18D, E22K, T26A, N29E, E53H, Q70L, G82K, D83A, and S87K; A18D, E22K, N29S, E52H, E53H, Q70L, G82K, D83A, S87K, and F88Y; A18D, E22K, N29S, E53H, Q70L, G82K, D83A, S87C, and F88Y; A18D, E22K, F24M, N29S, E53H, Q70L, G82K, D83A, S87K, and F88Y; A18D, N29S, E53H, Q70L, G82K, D83A, and F88Y; A18D, N29S, E53H, Q70L, G82K, D83A, S87K, and F88Y; A18D, E22K, T26A, N29S, E53H, H57Y, Q70L, G82K, D83A, and S87K; I33R, E52H, Y55F, Q70A, G80A, D83K, and V84K; D13R, A18D, N29S, Q70L, D71Q, G80A, and D83K; I33R, E52H, Y55F, Q70A, I74G, and D83K; T26R, I33H, E52H, Y55F, Q70A, and D83K; A18D, T26R, E52H, Y55F, Q70A, G80A, D83N, V84K, and Y85A; T26R, I33H, Y55F, Q70A, G80A, D83K, and Y85A; E22K, T26H, N29S, D39G, K49Q, E52H, D83N, and V84K; E17N, A18D, V31L, D71S, D83A, and V84F; or A18D, V31L, D39Q, D71S, D83A, and V84F.

[0023] In some embodiments, the PKC comprises an amino acid substitution at a residue corresponding to position 17, 18, 26, 29, 31, 33, 37, 39, 71, 80, 83, 84, and/or 95 in SEQ ID NO: 1.

[0024] In some embodiments, the PKC comprises: the amino acid N at a residue corresponding to position 17 in SEQ ID NO: 1; the amino acid D at a residue corresponding to position 18 in SEQ ID NO: 1; the amino acid A or H at a residue corresponding to position 26 in SEQ ID NO: 1; the amino acid T at a residue corresponding to position 29 in SEQ ID NO: 1; the amino acid L at a residue corresponding to position 31 in SEQ ID NO: 1; the amino acid R, H, or N at a residue corresponding to position 33 in SEQ ID NO: 1; the amino acid L at a residue corresponding to position 37 in SEQ ID NO: 1; the amino acid Q or G at a residue corresponding to position 39 in SEQ ID NO: 1; the amino acid S at a residue corresponding to position 71 in SEQ ID NO: 1; the amino acid A at a residue corresponding to position 80 in SEQ ID NO: 1; the amino acid Q, N, or A at a residue corresponding to position 83 in SEQ ID NO: 1; the amino acid F at a residue corresponding to position 84 in SEQ ID NO: 1; and/or the amino acid M at a residue corresponding to position 95 in SEQ ID NO: 1.

[0025] In some embodiments, relative to SEQ ID NO: 1, the PKC comprises: E17N, A18D, and D39G; D39Q, and F95M; I33N and F95M; E17N, I33R, and F95M; T26H, D83Q, and F95M; I33H, D39Q, and D71S; N29T, I33N, and D71S; I33N, D39Q, and F95M; D71S, D83N, and F95M; D39Q and D83Q; A18D and M37L; E17N, A18D, and I33N; D39G, D71S, and V84F; N29T and D39G; A18D, D71S, and G80A; N29T, V31L, and D39Q; A18D, V31L, and D39G; T26H, N29T, and D39Q; T26A, N29T, and I33H; D39Q, D71S, and G80A; A18D, D39Q, and V84F; E17N, I33R, and D39Q; E17N, D71S, and F95M; E17N, 133N, and F95M; T26A, N29T, and V31L; E17N, T26A, and D39G; A18D, D39Q, and D71S; V31L, D39G, and V84F; N29T, I33R, and D39Q; D39G, D71S, and D83N; V31L, D71S, and D83Q; I33R, D39Q, and V84F; D39G and D71S; E17N, I33H, and D71S; T26H, D39G, and V84F; A18D, I33R, and D39G; T26A, D83N, and F95M; V31L, I33H, and D71S; V31L, D39G, and D71S; A18D and D39Q; I33R, D39G, and D71S; E17N, G80A, and D83N; A18D, N29T, and V31L; D39Q, D71S, and D83A; A18D, T26H, and D39Q; T26A and F95M; I33H, D39G, and D83Q; T26H, I33N, and G80A; I33R, D39G, and F95M; V31L, I33R, and D83N; N29T, D39G, and V84F; D71S and D83Q; I33H, D39Q, and G80A; E17N, D39G, and D83A; E17N, 133N, and V84F; N29T, I33N, and D83Q; I33N, D71S, and G80A; I33R, D39G, and D83N; T26A and N29T; I33H, D83Q, and F95M; T26A, V31L, and D39Q; E17N, V31L, and I33N; E17N, T26A, and M37L; or N29T and I33N.

[0026] In some embodiments, the PKC comprises an amino acid substitution at a residue corresponding to position 13, 18, 22, 26, 29, 33, 39, 49, 52, 55, 61, 64, 65, 66, 68, 70, 71, 74, 80, 83, 84, 85, and/or 98 in SEQ ID NO: 1.

[0027] In some embodiments, the PKC comprises: the amino acid R at a residue corresponding to position 13 in SEQ ID NO: 1; the amino acid D at a residue corresponding to position 18 in SEQ ID NO: 1; the amino acid K at a residue corresponding to position 22 in SEQ ID NO: 1; the amino acid R or H at a residue corresponding to position 26 in SEQ ID NO: 1; the amino acid S at a residue corresponding to position 29 in SEQ ID NO: 1; the amino acid R or H at a residue corresponding to position 33 in SEQ ID NO: 1; the amino acid G at a residue corresponding to position 39 in SEQ ID NO: 1; the amino acid Q at a residue corresponding to position 49 in SEQ ID NO: 1; the amino acid H at a residue corresponding to position 52 in SEQ ID NO: 1; the amino acid F at a residue corresponding to position 55 in SEQ ID NO: 1; the amino acid D at a residue corresponding to position 61 in SEQ ID NO: 1; the amino acid D at a residue corresponding to position 64 in SEQ ID NO: 1; the amino acid N at a residue corresponding to position 65 in SEQ ID NO: 1; the amino acid Y at a residue corresponding to position 66 in SEQ ID NO: 1; the amino acid G at a residue corresponding to position 68 in SEQ ID NO: 1; the amino acid A or L at a residue corresponding to position 70 in SEQ ID NO: 1; the amino acid E or Q at a residue corresponding to position 71 in SEQ ID NO: 1; the amino acid G at a residue corresponding to position 74 in SEQ ID NO: 1; the amino acid N or A at a residue corresponding to position 80 in SEQ ID NO: 1; the amino acid K or N at a residue corresponding to position 83 in SEQ ID NO: 1; the amino acid K at a residue corresponding to position 84 in SEQ ID NO: 1; the amino acid F or A at a residue corresponding to position 85 in SEQ ID NO: 1; and/or the amino acid E or K at a residue corresponding to position 98 in SEQ ID NO: 1.

[0028] In some embodiments, relative to SEQ ID NO: 1, the PKC comprises: Y85F; E64D, D71E, and T98K; S65N; V66Y; G80N; T68G; D71E; E64D and D71E; D71E and Y85F; I33R, E52H, Y55F, Q70A, G80A, D83K, and V84K; D13R, A18D, N29S, Q70L, D71Q, G80A, and D83K; I33R, E52H, Y55F, Q70A, I74G, and D83K; Y55F, G80A, and D83K; T26R, I33H, E52H, Y55F, Q70A, and D83K; A18D, T26R, E52H, Y55F, Q70A, G80A, D83N, V84K, and Y85A; T98E; T26R, I33H, Y55F, Q70A, G80A, D83K, and Y85A; V61D; or E22K, T26H, N29S, D39G, K49Q, E52H, D83N, and V84K.

[0029] In some embodiments, the PKC comprises an amino acid substitution at a residue corresponding to position 13, 17, 18, 22, 26, 29, 31, 33, 39, 52, 55, 61, 64, 65, 66, 70, 71, 74, 80, 82, 83, 84, 85, 88, 95, and/or 98 in SEQ ID NO: 1.

[0030] In some embodiments, the PKC comprises: the amino acid R at a residue corresponding to position 13 in SEQ ID NO: 1; the amino acid N at a residue corresponding to position 17 in SEQ ID NO: 1; the amino acid D at a residue corresponding to position 18 in SEQ ID NO: 1; the amino acid K at a residue corresponding to position 22 in SEQ ID NO: 1; the amino acid R at a residue corresponding to position 26 in SEQ ID NO: 1; the amino acid S at a residue corresponding to position 29 in SEQ ID NO: 1; the amino acid L at a residue corresponding to position 31 in SEQ ID NO: 1; the amino acid H, N, or R at a residue corresponding to position 33 in SEQ ID NO: 1; the amino acid G or Q at a residue corresponding to position 39 in SEQ ID NO: 1; the amino acid H at a residue corresponding to position 52 in SEQ ID NO: 1; the amino acid F at a residue corresponding to position 55 in SEQ ID NO: 1; the amino acid S at a residue corresponding to position 61 in SEQ ID NO: 1; the amino acid D at a residue corresponding to position 64 in SEQ ID NO: 1; the amino acid N at a residue corresponding to position 65 in SEQ ID NO: 1; the amino acid Y at a residue corresponding to position 66 in SEQ ID NO: 1; the amino acid A or L at a residue corresponding to position 70 in SEQ ID NO: 1; the amino acid E, Q, or S at a residue corresponding to position 71 in SEQ ID NO: 1; the amino acid G at a residue corresponding to position 74 in SEQ ID NO: 1; the amino acid A at a residue corresponding to position 80 in SEQ ID NO: 1; the amino acid R at a residue corresponding to position 82 in SEQ ID NO: 1; the amino acid A, E, K, or N at a residue corresponding to position 83 in SEQ ID NO: 1; the amino acid F or K at a residue corresponding to position 84 in SEQ ID NO: 1; the amino acid A or F at a residue corresponding to position 85 in SEQ ID NO: 1; the amino acid N at a residue corresponding to position 88 in SEQ ID NO: 1; the amino acid M at a residue corresponding to position 95 in SEQ ID NO: 1; and/or the amino acid K or Y at a residue corresponding to position 98 in SEQ ID NO: 1.

[0031] In some embodiments, the PKC comprises an amino acid substitution at a residue corresponding to position 13, 17, 18, 22, 26, 31, 33, 39, 52, 55, 64, 65, 66, 70, 71, 74, 80, 82, 83, 84, 85, 88, and/or 98 in SEQ ID NO: 1.

[0032] In some embodiments, the PKC comprises: the amino acid R at a residue corresponding to position 13 in SEQ ID NO:1; the amino acid N at a residue corresponding to position 17 in SEQ ID NO:1; the amino acid D at a residue corresponding to position 18 in SEQ ID NO:1; the amino acid K at a residue corresponding to position 22 in SEQ ID NO:1; the amino acid R at a residue corresponding to position 26 in SEQ ID NO:1; the amino acid L at a residue corresponding to position 31 in SEQ ID NO:1; the amino acid R, H or N at a residue corresponding to position 33 in SEQ ID NO:1; the amino acid G at a residue corresponding to position 39 in SEQ ID NO:1; the amino acid H at a residue corresponding to position 52 in SEQ ID NO:1; the amino acid F at a residue corresponding to position 55 in SEQ ID NO:1; the amino acid D at a residue corresponding to position 64 in SEQ ID NO:1; the amino acid N at a residue corresponding to position 65 in SEQ ID NO:1; the amino acid Y at a residue corresponding to position 66 in SEQ ID NO:1; the amino acid A at a residue corresponding to position 70 in SEQ ID NO:1; the amino acid S or E at a residue corresponding to position 71 in SEQ ID NO:1; the amino acid R at a residue corresponding to position 82 in SEQ ID NO: 1; the amino acid G at a residue corresponding to position 74 in SEQ ID NO:1; the amino acid A at a residue corresponding to position 80 in SEQ ID NO:1; the amino acid E, A, K, or N at a residue corresponding to position 83 in SEQ ID NO:1; the amino acid K or F at a residue corresponding to position 84 in SEQ ID NO:1; the amino acid F at a residue corresponding to position 85 in SEQ ID NO:1; the amino acid N at a residue corresponding to position 88 in SEQ ID NO: 1; and/or the amino acid K or Y at a residue corresponding to position 98 in SEQ ID NO:1.

[0033] In some embodiments, relative to SEQ ID NO: 1, the PKC comprises: A18D, T26R, I33R, D39G, E52H, Y55F, E64D, Q70A, G80A, D83N, and V84K; E17N, T26R, V31L, D71S, D83E, and V84F; E17N, V31L, I33N, E64D, D71S, and V84F; E17N, A18D, V31L, D71S, D83A, and V84F; E17N, E22K, V31L, I33N, D71E, and V84F; E17N, A18D, V31L, D71E, D83A, and V84F; E17N, V31L, D71S, D83E, V84F, and T98Y; V84K, T26R, D39G, D83E, T98K, and S65N; E17N, A18D, V31L, I33N, D71S, D83E, and V84K; E17N, A18D, V31L, D71S, I74G, D83E, and V84F; E17N, V31L, I33N, D71S, V84K, and Y85F; A18D, T26R, I33R, E52H, Y55F, V66Y, Q70A, G80A, D83N, V84K, and Y85F; E17N, A18D, V31L, I33N, D71S, D83K, and V84K; E17N, A18D, T26R, V31L, I33N, D71S, and V84K; V84K, T26R, D39G, D13R, T98K, and S65N; E17N, V31L, I33N, S65N, D71S, and V84K; E17N, A18D, E22K, V31L, I33N, D71E, and V84F; D13R, E17N, A18D, V31L, D71S, D83A, and V84K; E17N, V31L, D39G, D71S, D83A, and V84K; D13R, A18D, T26R, E52H, Y55F, Q70A, G80A, D83N, V84K, and Y85F; E17N, A18D, T26R, V31L, D71S, D83A, and V84K; E17N, V31L, I33N, D71S, G82R, and V84F; E17N, V31L, I33N, D71S, V84K, and T98K; V84K, T26R, D39G, D83E, D13R, and T98K; V84K, T26R, D83E, D13R, T98K, and S65N; E17N, V31L, I33N, V66Y, D71E, and V84F; E17N, A18D, V31L, 133N, D71E, and V84F; E17N, A18D, V31L, I33N, D71S, G80A, and V84F; A18D, T26R, E52H, Y55F, Q70A, G80A, D83N, V84K, Y85F, and F88N; E17N, A18D, V31L, I33N, D71S, V84K, and T98K; E17N, A18D, V31L, I33N, S65N, D71S, and V84K; T26R, I33H, Y55F, Q70A, G80A, D83K, V84K, and F88N; A18D, E22K, T26R, E52H, Y55F, Q70A, D71E, G80A, D83N, and V84K; or E17N, V31L, 133N, D71E, G82R, and V84F.

[0034] In some embodiments, PKC comprises a sequence that is at least 90% identical to any one of SEQ ID NOs: 19-106, 196-388, 582-669, 671-742, and 745-948.

[0035] In some embodiments, the PKC comprises a sequence that is at least 90% identical to any one of SEQ ID NOs: 19, 21, 23, 24, 26, 27, 29, 32, 33, 34, 35, 38, 40, 42, 43, 45, 48, 49, 50, 51, 53, 58, 60, 62, 65, 66, 67, 68, 78, 87, 91, 92, 94, 99, 103, 105, 219, 220, 231, 234, 240, 254, 255, 258 283, 289, 294, 344, 345, 349, 365, 582-603, 605, 606, 607, 608, 610, 611, 612, 614, 616, 617, 618, 622, 625, 627, 629, 631, 632, 633, 634, 637, 638, 639, 640, 641, 642, 643, 644, 646, 648, 651, 653, 654, 655, 656, 657, 658, 659, 660, 661, 662, 663, 666, 667, 668, 672, 673, 674, 675, 676, 679, 680, 683, 684, 685, 686, 691, 693, 694, 695, 696, 697, 699, 700, 703, 707,711, 713, 714, 715, 724, 732, 734, 735, 736, 737, 738, 739, 749, 751, 765, 768, 790, 808, 810, 822, 828, 840, 846, 857, 862, 865, 921, 922, 858, 850, 851, 933, 871, 809, 926, 923, 924, 758, 747, 757, 875, 908, 823, 833, and 777.

[0036] In some embodiments, the PKC comprises a sequence selected from any one of SEQ ID NOs: 19-106, 196-388, 582-669, 671-742, and 745-948.

[0037] In some embodiments, the PKC comprises a sequence selected from any one of SEQ ID NOs: 19, 21, 23, 24, 26, 27, 29, 32, 33, 34, 35, 38, 40, 42, 43, 45, 48, 49, 50, 51, 53, 58, 60, 62, 65, 66, 67, 68, 78, 87, 91, 92, 94, 99, 103, 105, 219, 220, 231, 234, 240, 254, 255, 258 283, 289, 294, 344, 345, 349, 365, 582-603, 605, 606, 607, 608, 610, 611, 612, 614, 616, 617, 618, 622, 625, 627, 629, 631, 632, 633, 634, 637, 638, 639, 640, 641, 642, 643, 644, 646, 648, 651, 653, 654, 655, 656, 657, 658, 659, 660, 661, 662, 663, 666, 667, 668, 672, 673, 674, 675, 676, 679, 680, 683, 684, 685, 686, 691, 693, 694, 695, 696, 697, 699, 700, 703, 707, 711, 713, 714, 715, 724, 732, 734, 735, 736, 737, 738, 739, 749, 751, 765, 768, 790, 808, 810, 822, 828, 840, 846, 857, 862, 865, 921, 922, 858, 850, 851, 933, 871, 809, 926, 923, 924, 758, 747, 757, 875, 908, 823, 833, and 777.

[0038] In some embodiments, the heterologous polynucleotide comprises a sequence that is at least 90% identical to any one of SEQ ID NOs: 107-194, 389-581, 949-1036, 1038-1109 and 1112-1315.

[0039] In some embodiments, the heterologous polynucleotide comprises a sequence selected from any one of SEQ ID NOs: 107-194, 389-581, 949-1036, 1038-1109 and 1112-1315.

[0040] In some embodiments, the heterologous polynucleotide comprises a sequence that is at least 90% identical to any one of SEQ ID NOs: 107, 109, 111, 112, 114, 115, 117, 120, 121, 122, 123, 126, 128, 130, 131, 133, 136, 137, 138, 139, 141, 146, 148, 150, 153, 154, 155, 156, 166, 175, 179, 180, 182, 187, 191, 193, 412, 413, 424, 427, 433, 447, 448, 451, 476, 482, 487, 537, 538, 542, 558, 949-970, 1074, 972, 973, 974, 975, 977, 978, 979, 981, 983, 984, 985, 989, 992, 994, 996, 998, 999, 1000, 1001, 1004, 1005, 1006, 1007, 1008, 1009, 1010, 1011, 1013, 1015, 1018, 1020, 1021, 1022, 1023, 1024, 1025, 1026, 1027, 1028, 1029, 1030, 1033, 1034, 1035, 1039, 1040, 1041, 1042, 1043, 1046, 1047, 1050, 1051, 1052, 1053, 1058, 1060, 1061, 1062, 1063, 1064, 1066, 1067, 1070, 1078, 1080, 1081, 1082, 1091, 1099, 1101, 1102, 1103, 1104, 1105, 1106, 1116, 1118, 1132, 1135, 1157, 1175, 1177, 1189, 1195, 1207, 1213, 1224, 1229, 1232, 1288, 1289, 1225, 1217, 1218, 1300, 1238, 1176, 1293, 1290, 1291, 1125, 1114, 1124, 1242, 1275, 1190, 1200, and 1144.

[0041] In some embodiments, the heterologous polynucleotide comprises a sequence selected from any one of SEQ ID NOs: 107, 109, 111, 112, 114, 115, 117, 120, 121, 122, 123, 126, 128, 130, 131, 133, 136, 137, 138, 139, 141, 146, 148, 150, 153, 154, 155, 156, 166, 175, 179, 180, 182, 187, 191, 193, 412, 413, 424, 427, 433, 447, 448, 451, 476, 482, 487, 537, 538, 542, 558, 949-970, 1074, 972, 973, 974, 975, 977, 978, 979, 981, 983, 984, 985, 989, 992, 994, 996, 998, 999, 1000, 1001, 1004, 1005, 1006, 1007, 1008, 1009, 1010, 1011, 1013, 1015, 1018, 1020, 1021, 1022, 1023, 1024, 1025, 1026, 1027, 1028, 1029, 1030, 1033, 1034, 1035, 1039, 1040, 1041, 1042, 1043, 1046, 1047, 1050, 1051, 1052, 1053, 1058, 1060, 1061, 1062, 1063, 1064, 1066, 1067, 1070, 1078, 1080, 1081, 1082, 1091, 1099, 1101, 1102, 1103, 1104, 1105, 1106, 1116, 1118, 1132, 1135, 1157, 1175, 1177, 1189, 1195, 1207, 1213, 1224, 1229, 1232, 1288, 1289, 1225, 1217, 1218, 1300, 1238, 1176, 1293, 1290, 1291, 1125, 1114, 1124, 1242, 1275, 1190, 1200, and 1144.

[0042] In some embodiments, the PKC comprises at least 6, 7, 8, 9, or 10 amino acid substitutions or deletions relative to SEQ ID NO: 1.

[0043] In some embodiments, the PKC is capable of producing at least 10%, 20%, 30%, 40%, 50%, 60%, 70%, 80%, 90%, 100%, or more olivetolic acid relative to a control.

[0044] In some embodiments, the control is a PKC that does not comprise one or more of the amino acid substitutions or deletions.

[0045] Further aspects of the disclosure relate to host cells that comprise a heterologous polynucleotide encoding a polyketide cyclase (PKC), wherein the PKC comprises an amino acid substitution at a residue corresponding to position 13, 17, 18, 22, 26, 31, 33, 39, 52, 55, 64, 65, 66, 70, 71, 74, 80, 82, 83, 84, 85, 88, and/or 98 in SEQ ID NO: 1.

[0046] In some embodiments, the PKC comprises: the amino acid R at a residue corresponding to position 13 in SEQ ID NO:1; the amino acid N at a residue corresponding to position 17 in SEQ ID NO:1; the amino acid D at a residue corresponding to position 18 in SEQ ID NO:1; the amino acid K at a residue corresponding to position 22 in SEQ ID NO:1; the amino acid R at a residue corresponding to position 26 in SEQ ID NO:1; the amino acid L at a residue corresponding to position 31 in SEQ ID NO:1; the amino acid R, H or N at a residue corresponding to position 33 in SEQ ID NO:1; the amino acid G at a residue corresponding to position 39 in SEQ ID NO:1; the amino acid H at a residue corresponding to position 52 in SEQ ID NO:1; the amino acid F at a residue corresponding to position 55 in SEQ ID NO:1; the amino acid D at a residue corresponding to position 64 in SEQ ID NO:1; the amino acid N at a residue corresponding to position 65 in SEQ ID NO:1; the amino acid Y at a residue corresponding to position 66 in SEQ ID NO:1; the amino acid A at a residue corresponding to position 70 in SEQ ID NO:1; the amino acid S or E at a residue corresponding to position 71 in SEQ ID NO:1; the amino acid R at a residue corresponding to position 82 in SEQ ID NO: 1; the amino acid G at a residue corresponding to position 74 in SEQ ID NO:1; the amino acid A at a residue corresponding to position 80 in SEQ ID NO:1; the amino acid E, A, K, or N at a residue corresponding to position 83 in SEQ ID NO:1; the amino acid K or F at a residue corresponding to position 84 in SEQ ID NO:1; the amino acid F at a residue corresponding to position 85 in SEQ ID NO:1; the amino acid N at a residue corresponding to position 88 in SEQ ID NO: 1; and/or the amino acid K or Y at a residue corresponding to position 98 in SEQ ID NO:1.

[0047] In some embodiments, relative to SEQ ID NO: 1, the PKC comprises: A18D, T26R, I33R, D39G, E52H, Y55F, E64D, Q70A, G80A, D83N, and V84K; E17N, T26R, V31L, D71S, D83E, and V84F; E17N, V31L, I33N, E64D, D71S, and V84F; E17N, A18D, V31L, D71S, D83A, and V84F; E17N, E22K, V31L, I33N, D71E, and V84F; E17N, A18D, V31L, D71E, D83A, and V84F; E17N, V31L, D71S, D83E, V84F, and T98Y; V84K, T26R, D39G, D83E, T98K, and S65N; E17N, A18D, V31L, I33N, D71S, D83E, and V84K; E17N, A18D, V31L, D71S, I74G, D83E, and V84F; E17N, V31L, I33N, D71S, V84K, and Y85F; A18D, T26R, I33R, E52H, Y55F, V66Y, Q70A, G80A, D83N, V84K, and Y85F; E17N, A18D, V31L, I33N, D71S, D83K, and V84K; E17N, A18D, T26R, V31L, I33N, D71S, and V84K; V84K, T26R, D39G, D13R, T98K, and S65N; E17N, V31L, I33N, S65N, D71S, and V84K; E17N, A18D, E22K, V31L, I33N, D71E, and V84F; D13R, E17N, A18D, V31L, D71S, D83A, and V84K; E17N, V31L, D39G, D71S, D83A, and V84K; D13R, A18D, T26R, E52H, Y55F, Q70A, G80A, D83N, V84K, and Y85F; E17N, A18D, T26R, V31L, D71S, D83A, and V84K; E17N, V31L, I33N, D71S, G82R, and V84F; E17N, V31L, I33N, D71S, V84K, and T98K; V84K, T26R, D39G, D83E, D13R, and T98K; V84K, T26R, D83E, D13R, T98K, and S65N; E17N, V31L, I33N, V66Y, D71E, and V84F; E17N, A18D, V31L, 133N, D71E, and V84F; E17N, A18D, V31L, I33N, D71S, G80A, and V84F; A18D, T26R, E52H, Y55F, Q70A, G80A, D83N, V84K, Y85F, and F88N; E17N, A18D, V31L, I33N, D71S, V84K, and T98K; E17N, A18D, V31L, I33N, S65N, D71S, and V84K; T26R, I33H, Y55F, Q70A, G80A, D83K, V84K, and F88N; A18D, E22K, T26R, E52H, Y55F, Q70A, D71E, G80A, D83N, and V84K; or E17N, V31L, 133N, D71E, G82R, and V84F.

[0048] In some embodiments, the PKC comprises a sequence that is at least 90% identical to any one of SEQ ID NOs: 255, 749, 751, 765, 768, 790, 808, 810, 822, 828, 840, 846, 857, 862, 865, 921, 922, 858, 850, 851, 933, 871, 809, 926, 923, 924, 758, 747, 757, 875, 908, 823, 833, and 777.

[0049] In some embodiments, the PKC comprises any one of SEQ ID NOs: 255, 749, 751, 765, 768, 790, 808, 810, 822, 828, 840, 846, 857, 862, 865, 921, 922, 858, 850, 851, 933, 871, 809, 926, 923, 924, 758, 747, 757, 875, 908, 823, 833, and 777.

[0050] In some embodiments, the heterologous polynucleotide comprises a sequence that is at least 90% identical to any one of SEQ ID NOs: 448, 1116, 1118, 1132, 1135, 1157, 1175, 1177, 1189, 1195, 1207, 1213, 1224, 1229, 1232, 1288, 1289, 1225, 1217, 1218, 1300, 1238, 1176, 1293, 1290, 1291, 1125, 1114, 1124, 1242, 1275, 1190, 1200, and 1144.

[0051] In some embodiments, the heterologous polynucleotide comprises any one of SEQ ID NOs: 448, 1116, 1118, 1132, 1135, 1157, 1175, 1177, 1189, 1195, 1207, 1213, 1224, 1229, 1232, 1288, 1289, 1225, 1217, 1218, 1300, 1238, 1176, 1293, 1290, 1291, 1125, 1114, 1124, 1242, 1275, 1190, 1200, and 1144.

[0052] In some embodiments, relative to SEQ ID NO: 1, the PKC comprises A18D, T26R, I33R, D39G, E52H, Y55F, E64D, Q70A, G80A, D83N, and V84K. In some embodiments, relative to SEQ ID NO: 1, the PKC comprises E17N, T26R, V31L, D71S, D83E, and V84F. In some embodiments, relative to SEQ ID NO: 1, the PKC comprises E17N, V31L, I33N, E64D, D71S, and V84F. In some embodiments, relative to SEQ ID NO: 1, the PKC comprises E17N, A18D, V31L, D71S, D83A, and V84F. In some embodiments, relative to SEQ ID NO: 1, the PKC comprises E17N, E22K, V31L, I33N, D71E, and V84F. In some embodiments, relative to SEQ ID NO: 1, the PKC comprises E17N, A18D, V31L, D71E, D83A, and V84F. In some embodiments, relative to SEQ ID NO: 1, the PKC comprises E17N, V31L, D71S, D83E, V84F, and T98Y. In some embodiments, relative to SEQ ID NO: 1, the PKC comprises V84K, T26R, D39G, D83E, T98K, and S65N. In some embodiments, relative to SEQ ID NO: 1, the PKC comprises E17N, A18D, V31L, I33N, D71S, D83E, and V84K. In some embodiments, relative to SEQ ID NO: 1, the PKC comprises E17N, A18D, V31L, D71S, I74G, D83E, and V84F. In some embodiments, relative to SEQ ID NO: 1, the PKC comprises E17N, V31L, I33N, D71S, V84K, and Y85F. In some embodiments, relative to SEQ ID NO: 1, the PKC comprises A18D, T26R, I33R, E52H, Y55F, V66Y, Q70A, G80A, D83N, V84K, and Y85F. In some embodiments, relative to SEQ ID NO: 1, the PKC comprises E17N, A18D, V31L, I33N, D71S, D83K, and V84K. In some embodiments, relative to SEQ ID NO: 1, the PKC comprises E17N, A18D, T26R, V31L, I33N, D71S, and V84K. In some embodiments, relative to SEQ ID NO: 1, the PKC comprises V84K, T26R, D39G, D13R, T98K, and S65N. In some embodiments, relative to SEQ ID NO: 1, the PKC comprises E17N, V31L, I33N, S65N, D71S, and V84K. In some embodiments, relative to SEQ ID NO: 1, the PKC comprises E17N, A18D, E22K, V31L, I33N, D71E, and V84F. In some embodiments, relative to SEQ ID NO: 1, the PKC comprises D13R, E17N, A18D, V31L, D71S, D83A, and V84K. In some embodiments, relative to SEQ ID NO: 1, the PKC comprises E17N, V31L, D39G, D71S, D83A, and V84K. In some embodiments, relative to SEQ ID NO: 1, the PKC comprises D13R, A18D, T26R, E52H, Y55F, Q70A, G80A, D83N, V84K, and Y85F. In some embodiments, relative to SEQ ID NO: 1, the PKC comprises E17N, A18D, T26R, V31L, D71S, D83A, and V84K. In some embodiments, relative to SEQ ID NO: 1, the PKC comprises E17N, V31L, I33N, D71S, G82R, and V84F. In some embodiments, relative to SEQ ID NO: 1, the PKC comprises E17N, V31L, I33N, D71S, V84K, and T98K. In some embodiments, relative to SEQ ID NO: 1, the PKC comprises V84K, T26R, D39G, D83E, D13R, and T98K. In some embodiments, relative to SEQ ID NO: 1, the PKC comprises V84K, T26R, D83E, D13R, T98K, and S65N. In some embodiments, relative to SEQ ID NO: 1, the PKC comprises E17N, V31L, I33N, V66Y, D71E, and V84F. In some embodiments, relative to SEQ ID NO: 1, the PKC comprises E17N, A18D, V31L, I33N, D71E, and V84F. In some embodiments, relative to SEQ ID NO: 1, the PKC comprises E17N, A18D, V31L, I33N, D71S, G80A, and V84F. In some embodiments, relative to SEQ ID NO: 1, the PKC comprises A18D, T26R, E52H, Y55F, Q70A, G80A, D83N, V84K, Y85F, and F88N. In some embodiments, relative to SEQ ID NO: 1, the PKC comprises E17N, A18D, V31L, I33N, D71S, V84K, and T98K. In some embodiments, relative to SEQ ID NO: 1, the PKC comprises E17N, A18D, V31L, I33N, S65N, D71S, and V84K. In some embodiments, relative to SEQ ID NO: 1, the PKC comprises T26R, I33H, Y55F, Q70A, G80A, D83K, V84K, and F88N. In some embodiments, relative to SEQ ID NO: 1, the PKC comprises A18D, E22K, T26R, E52H, Y55F, Q70A, D71E, G80A, D83N, and V84K. In some embodiments, relative to SEQ ID NO: 1, the PKC comprises E17N, V31L, I33N, D71E, G82R, and V84F.

[0053] Further aspects of the disclosure relate to host cells that comprise a heterologous polynucleotide encoding a polyketide cyclase (PKC), wherein the PKC comprises at least 6 amino acid substitutions or deletions relative to SEQ ID NO: 1, wherein the PKC comprises at least two amino acid substitutions in a domain corresponding to helix 3 (positions 76-85 in SEQ ID NO: 1), and wherein the PKC is capable of producing olivetolic acid from 3,5,7-trioxododecanoyl-CoA.

[0054] In some embodiments, the at least two amino acid includes an amino acid substitution at position 84 relative to SEQ ID NO: 1.

[0055] In some embodiments, at least one of the at least two amino acid substitutions increases the stability of a kinked helix defined by the domains corresponding to (positions 66-73 in SEQ ID NO: 1), turn 1 (positions 74-75 in SEQ ID NO: 1), and helix 3 (positions 76-85 in SEQ ID NO: 1) and/or improves conformation of a binding pocket of the PKC to 3,5,7-trioxododecanoyl-CoA and/or olivetolic acid.

[0056] In some embodiments, the at least two amino acid substitutions in the domain corresponding to helix 3 (positions 76-85 in SEQ ID NO: 1) are at residues corresponding to positions 80 and 82 in SEQ ID NO: 1.

[0057] In some embodiments, the PKC comprises: the amino acid E, A, or S at the residue corresponding to position 80 in SEQ ID NO: 1; and/or the amino acid V or K at the residue corresponding to position 82 in SEQ ID NO: 1.

[0058] In some embodiments, the PKC further comprises an amino acid substitution at a residue corresponding to position 73 or 74 in SEQ ID NO: 1.

[0059] In some embodiments, the PKC comprises the amino acid L at the residue corresponding to position 73 in SEQ ID NO: 1; and/or the PKC comprises the amino acid S or L at the residue corresponding to position 74 in SEQ ID NO: 1.

[0060] In some embodiments, the PKC comprises an amino acid substitution at a residue corresponding to any of positions position 84 and/or 86-89 in SEQ ID NO: 1.

[0061] In some embodiments, the PKC comprises: the amino acid M at the residue corresponding to position 84 in SEQ ID NO: 1; the amino acid G at the residue corresponding to position 86 in SEQ ID NO: 1; the amino acid D at the residue corresponding to position 87 in SEQ ID NO: 1; the amino acid Y at the residue corresponding to position 88 in SEQ ID NO: 1; and/or the amino acid V at the residue corresponding to position 89 in SEQ ID NO: 1.

[0062] In some embodiments, the host cell produces at least 10%, 20%, 30%, 40%, 50%, 60%, 70%, 80%, 90%, 100%, or more of the PKC relative to a control host cell.

[0063] In some embodiments, the control host cell does not comprise the PKC.

[0064] In some embodiments, the PKC is capable of producing at least 10%, 20%, 30%, 40%, 50%, 60%, 70%, 80%, 90%, 100%, or more of olivetolic acid relative to a control.

[0065] In some embodiments, the control is a PKC that does not comprise one or more of the at least two amino acid substitutions in the domain corresponding to helix 3 (positions 76-85 in SEQ ID NO: 1).

[0066] In some embodiments, the PKC comprises one or more of the following: the amino acid G at a residue corresponding to position 2 in SEQ ID NO: 1; the amino acid M or Y at a residue corresponding to position 3 in SEQ ID NO: 1; the amino acid R or K at a residue corresponding to position 13 in SEQ ID NO: 1; the amino acid N at a residue corresponding to position 17 in SEQ ID NO: 1; the amino acid D or R at a residue corresponding to position 18 in SEQ ID NO: 1; the amino acid E or D at a residue corresponding to position 19 in SEQ ID NO: 1; the amino acid A at a residue corresponding to position 20 in SEQ ID NO: 1; the amino acid K at a residue corresponding to position 21 in SEQ ID NO: 1; the amino acid T or K at a residue corresponding to position 22 in SEQ ID NO: 1; the amino acid A or N at a residue corresponding to position 25 in SEQ ID NO: 1; the amino acid H, R, A, or E at a residue corresponding to position 26 in SEQ ID NO: 1; the amino acid A, S, E, or H at a residue corresponding to position 28 in SEQ ID NO: 1; the amino acid D, S, E, or T at a residue corresponding to position 29 in SEQ ID NO: 1; the amino acid L or A at a residue corresponding to position 31 in SEQ ID NO: 1; the amino acid H, R, D, E, K, Q, or N at a residue corresponding to position 33 in SEQ ID NO: 1; the amino acid L at a residue corresponding to position 37 in SEQ ID NO: 1; the amino acid L at a residue corresponding to position 38 in SEQ ID NO: 1; the amino acid G, S, or Q at a residue corresponding to position 39 in SEQ ID NO: 1; the amino acid K or R at a residue corresponding to position 41 in SEQ ID NO: 1; the amino acid I at a residue corresponding to position 45 in SEQ ID NO: 1; the amino acid K at a residue corresponding to position 50 in SEQ ID NO: 1; the amino acid H at a residue corresponding to position 52 in SEQ ID NO: 1; the amino acid H at a residue corresponding to position 53 in SEQ ID NO: 1; the amino acid F at a residue corresponding to position 55 in SEQ ID NO: 1; the amino acid Y at a residue corresponding to position 56 in SEQ ID NO: 1; the amino acid Y at a residue corresponding to position 57 in SEQ ID NO: 1; the amino acid I or L at a residue corresponding to position 60 in SEQ ID NO: 1; the amino acid M at a residue corresponding to position 62 in SEQ ID NO: 1; the amino acid Q or D at a residue corresponding to position 64 in SEQ ID NO: 1; the amino acid N at a residue corresponding to position 65 in SEQ ID NO: 1; the amino acid K at a residue corresponding to position 67 in SEQ ID NO: 1; the amino acid E, G, or H at a residue corresponding to position 68 in SEQ ID NO: 1; the amino acid A or L at a residue corresponding to position 70 in SEQ ID NO: 1; the amino acid Q or S, at a residue corresponding to position 71 in SEQ ID NO: 1; the amino acid D, E, H, or Q at a residue corresponding to position 74 in SEQ ID NO: 1; the amino acid A or G at a residue corresponding to position 83 in SEQ ID NO: 1; the amino acid F, K, M, or Q at a residue corresponding to position 84 in SEQ ID NO: 1; the amino acid A or F at a residue corresponding to position 85 in SEQ ID NO: 1; the amino acid G at a residue corresponding to position 86 in SEQ ID NO: 1; the amino acid D or K at a residue corresponding to position 87 in SEQ ID NO: 1; the amino acid Y, N, or S at a residue corresponding to position 88 in SEQ ID NO: 1; the amino acid M or I at a residue corresponding to position 95 in SEQ ID NO: 1; the amino acid F at a residue corresponding to position 97 in SEQ ID NO: 1; the amino acid E, K, or Y at a residue corresponding to position 98 in SEQ ID NO: 1; the amino acid A, G, K, N, Q, or S at a residue corresponding to position 100 in SEQ ID NO: 1; and/or the amino acid A or E at a residue corresponding to position 101 in SEQ ID NO: 1.

[0067] In some embodiments, the PKC further comprises one or more of the following: the amino acid M at a residue corresponding to position 24 in SEQ ID NO: 1; the amino acid F at a residue corresponding to position 46 in SEQ ID NO: 1; the amino acid A at a residue corresponding to position 48 in SEQ ID NO: 1; the amino acid Q at a residue corresponding to position 49 in SEQ ID NO: 1; the amino acid I or F at a residue corresponding to position 59 in SEQ ID NO: 1; the amino acid T, D, or S at a residue corresponding to position 61 in SEQ ID NO: 1; the amino acid L, M, or Y at a residue corresponding to position 66 in SEQ ID NO: 1; the amino acid L or Y at a residue corresponding to position 69 in SEQ ID NO: 1; the amino acid L at a residue corresponding to position 73 in SEQ ID NO: 1; the amino acid S at a residue corresponding to position 74 in SEQ ID NO: 1; the amino acid V, A, E, S, D, or N at a residue corresponding to position 80 in SEQ ID NO: 1; the amino acid Y at a residue corresponding to position 81 in SEQ ID NO: 1; the amino acid K, V, or R at a residue corresponding to position 82 in SEQ ID NO: 1; the amino acid V or M at a residue corresponding to position 89 in SEQ ID NO: 1; and/or the amino acid V at a residue corresponding to position 94 in SEQ ID NO: 1.

[0068] In some embodiments, the PKC comprises at least 6, 7, 8, 9, or 10 amino acid substitutions relative to SEQ ID NO: 1.

[0069] In some embodiments, the PKC is capable of producing at least 10%, 20%, 30%, 40%, 50%, 60%, 70%, 80%, 90%, 100%, or more of olivetolic acid relative to a control.

[0070] In some embodiments, the control is a PKC that does not comprise an amino acid substitution at a residue corresponding to position 2, 3, 13, 17, 18, 19, 20, 21, 22, 25, 26, 28, 29, 31, 33, 37, 38, 39, 41, 45, 50, 52, 53, 55, 56, 57, 60, 62, 64, 65, 67, 68, 70, 71, 74, 83, 84, 85, 86, 87, 88, 95, 97, 98, 100, and/or 101 in SEQ ID NO: 1.

[0071] Further aspects of the disclosure provide host cells that comprise a heterologous polynucleotide encoding a polyketide cyclase (PKC), wherein the PKC comprises one or more of the following amino acid substitutions 17, 18, 29, 31, 33, 39, 71, 83, and/or 84 relative to SEQ ID NO: 1, and wherein the PKC is capable of producing olivetolic acid from 3,5,7-trioxododecanoyl-CoA.

[0072] In some embodiments, the PKC comprises one or more of the following amino acid substitutions E17N, A18D, N29T, V31L, I33N, D39Q, D71S, D83A, and/or V84F relative to SEQ ID NO: 1.

[0073] In some embodiments, the PKC comprises at least 6, 7, 8, 9, or 10 amino acid substitutions or deletions relative to SEQ ID NO: 1.

[0074] In some embodiments, the PKC comprises: E17N, A18D, V31L, D39Q, D71S, and D83A relative to SEQ ID NO: 1; E17N, A18D, V31L, D71S, D83A, and V84F relative to SEQ ID NO: 1; or A18D, V31L, D39Q, D71S, D83A, and V84F relative to SEQ ID NO: 1.

[0075] In some embodiments, the PKC comprises a sequence that is at least 90% identical to SEQ ID NO: 255, 220, or 707. In some embodiments, the PKC comprises SEQ ID NO: 255, 220, 707.

[0076] In some embodiments, the PKC produces more olivetolic acid as compared to a control PKC comprising SEQ ID NO: 1. In some embodiments, the PKC produces more than 41,000 μg/L olivetolic acid.

[0077] In some embodiments, relative to a control PKC comprising SEQ ID NO: 1, the PKC produces a greater ratio of olivetolic acid to olivetol. In some embodiments, the PKC produces a ratio of olivetolic acid to olivetol that is higher than 3.1.

[0078] Further aspects of the disclosure provide host cells that comprise a heterologous polynucleotide encoding a polyketide cyclase (PKC), wherein the PKC comprises one or more amino acid substitutions relative to SEQ ID NO: 1 selected from the group consisting of: D13R; A18D; E22K; T26R or T26H; N29S; I33R or I33H; D39G; K49Q; E52H; Y55F; Q70A or Q70L; D71Q; I74G; G80A; D83K or D83N; V84K; and Y85A, wherein the PKC is capable of producing olivetolic acid from 3,5,7-trioxododecanoyl-CoA (4a).

[0079] In some embodiments, the PKC comprises at least 6, at least 7, at least 8, at least 9, or at least 10 amino acid substitutions or deletions relative to SEQ ID NO: 1.

[0080] In some embodiments, relative to SEQ ID NO: 1, the PKC comprises: I33R, E52H, Y55F, Q70A, G80A, D83K, and V84K; D13R, A18D, N29S, Q70L, D71Q, G80A, and D83K; I33R, E52H, Y55F, Q70A, I74G, and D83K; T26R, I33H, E52H, Y55F, Q70A, and D83K; A18D, T26R, E52H, Y55F, Q70A, G80A, D83N, V84K, and Y85A; T26R, I33H, Y55F, Q70A, G80A, D83K, and Y85A; or E22K, T26H, N29S, D39G, K49Q, E52H, D83N, and V84K.

[0081] In some embodiments, the PKC comprises a sequence that is at least 90% identical to SEQ ID NO: 283, 289, 294, 344, 345, 349, or 365. In some embodiments, the PKC comprises SEQ ID NO: 283, 289, 294, 344, 345, 349, or 365.

[0082] In some embodiments, the PKC produces more olivetolic acid as compared to a control PKC comprising SEQ ID NO: 1.

[0083] In some embodiments, the PKC produces more than 94,000 ug/L olivetolic acid.

[0084] In some embodiments, wherein the host cell is a plant cell, an algal cell, a yeast cell, a bacterial cell, or an animal cell. In some embodiments, the host cell is a yeast cell. In some embodiments, the yeast cell is a Saccharomyces cell, a Yarrowia cell, or a Komagataella cell. In some embodiments, the Saccharomyces cell is a Saccharomyces cerevisiae cell. In some embodiments, the yeast cell is a Yarrowia cell. In some embodiments, the host cell is a bacterial cell. In some embodiments, the bacterial cell is an E. coli cell. In some embodiments, the host cell further comprises one or more heterologous polynucleotides comprising one or more of: an acyl activating enzyme (AAE), a polyketide synthase (PKS), a prenyltransferase (PT), and/or a terminal synthase (TS). In some embodiments, the polyketide synthase is an olivetol synthase (OLS). In some embodiments, the terminal synthase is a cannabidiolic acid synthase (CBDAS). In some embodiments, the terminal synthase is a tetrahydrocannabinolic acid synthase (THCAS). In some embodiments, the terminal synthase is a cannabichromenic acid synthase (CBCAS).

[0085] Further aspects of the disclosure relate to methods of culturing any of the host cells of the disclosure.

[0086] Further aspects of the disclosure relate to methods for producing 2,4-dihydroxybenzoic acid optionally substituted at position 6 comprising contacting: a tetraketide with a polyketide cyclase (PKC), wherein the PKC comprises an amino acid substitution at one or more residues corresponding to one more or more positions selected from the group consisting of position 17, 18, 29, 31, 33, 39, 71, 83 and 84 in SEQ ID NO: 1.

[0087] In some embodiments, the PKC comprises at least 6, 7, 8, 9, or 10 amino acid substitutions or deletions relative to SEQ ID NO: 1. In some embodiments, the tetraketide is 3,5,7-trioxododecanoyl-CoA. In some embodiments, the 2,4-dihydroxybenzoic acid optionally substituted at position 6 is olivetolic acid. In some embodiments, contacting the tetraketide with the PKC occurs in vitro. In some embodiments, contacting the tetraketide with the PKC occurs in vivo.

[0088] In some embodiments, the PKC comprises at least six amino acid substitutions selected from the group consisting of E17N, A18D, N29T, V31L, I33N, D39Q, D71S, D83A, and V84F relative to SEQ ID NO: 1.

[0089] Further aspects of the disclosure relate to non-naturally occurring nucleic acid encoding a polyketide cyclase (PKC), wherein the non-naturally occurring nucleic acid encodes a PKC comprising a sequence with at least one amino acid substitution relative to SEQ ID NO: 1 and with at least 90% identity to SEQ ID NO: 62, 87, 220, 234, 219, 258, 231, 240, 255, 707, 749, 751, 765, 768, 790, 808, 810, 822, 828, 840, 846, 857, 862, 865, 921, 922, 858, 850, 851, 933, 871, 809, 926, 923, 924, 758, 747, 757, 875, 908, 823, 833, or 777.

[0090] Further aspects of the disclosure relate to non-naturally occurring nucleic acid encoding a polyketide cyclase (PKC) wherein relative to the sequence of SEQ ID NO: 1 the wherein the PKC comprises an amino acid substitution at one or more residues corresponding to one or more positions selected from the group consisting of position 17, 18, 29, 31, 33, 39, 71, 83 and 84 in SEQ ID NO: 1 and wherein the PKC is capable of producing olivetolic acid from 3,5,7-trioxododecanoyl-CoA.

[0091] In some embodiments, the PKC comprises at least 6 amino acid substitutions or deletions relative to SEQ ID NO: 1.

[0092] Further aspects of the disclosure relate to non-naturally occurring nucleic acid encoding a polyketide cyclase (PKC) wherein relative to the sequence of SEQ ID NO: 1, the PKC comprises an amino acid substitution at one or more residues corresponding to one or more positions selected from the group consisting of position 13, 17, 18, 22, 26, 31, 33, 39, 52, 55, 64, 65, 66, 70, 71, 74, 80, 82, 83, 84, 85, 88, and/or 98 in SEQ ID NO: 1 and wherein the PKC is capable of producing olivetolic acid from 3,5,7-trioxododecanoyl-CoA. Further aspects of the disclosure relate to vectors comprising non-naturally occurring nucleic acids associated with the disclosure. Further aspects of the disclosure relate to exoression cassettes comprising non-naturally occurring nucleic acids associated with the disclosure.

[0093] Further aspects of the disclosure relate to non-naturally occurring polyketide cyclase (PKC) wherein the PKC comprises an amino acid substitution at one or more residues corresponding to one or more positions selected from the group consisting of position 17, 18, 29, 31, 33, 39, 71, 83 and 84 in SEQ ID NO: 1, and wherein the PKC is capable of producing olivetolic acid from 3,5,7-trioxododecanoyl-CoA.

[0094] Further aspects of the disclosure relate to non-naturally occurring polyketide cyclase (PKC) wherein the PKC comprises an amino acid substitution at one or more residues corresponding to one or more positions selected from the group consisting of position 13, 17, 18, 22, 26, 31, 33, 39, 52, 55, 64, 65, 66, 70, 71, 74, 80, 82, 83, 84, 85, 88, and/or 98 in SEQ ID NO: 1, and wherein the PKC is capable of producing olivetolic acid from 3,5,7-trioxododecanoyl-CoA.

[0095] In some embodiments, the PKC comprises at least 6, 7, 8, 9, or 10 amino acid substitutions or deletions relative to SEQ ID NO: 1.

[0096] Further aspects of the disclosure relate to host cells transformed with non-naturally occurring nucleic acids, vectors, or expression cassettes associated with the disclosure.

[0097] Further aspects of the disclosure relate to host cells that comprise a heterologous polynucleotide encoding a polyketide cyclase (PKC), wherein the PKC comprises one or more amino acid substitutions relative to SEQ ID NO: 1 selected from the group consisting of: A2G; V3M or V3Y; D13R or D13K; E17N; A18D or A18R; Q19E or Q19D; K20A; E21K; E22T or E22K; K25A or K25N; T26H, T26R, T26A, or T26E; V28A, V28S, V28E, or V28H; N29D, N29S, N29E, or N29T; V31L or V31A; 133H, 133R, 133D, 133E, 133K, 133Q, or 133N; M37L; K38L; D39G, D39S, or D39Q; Y41K or Y41R; D45I; N50K; E52H; E53H; Y55F; T56Y; H57Y; E601 or E60L; T62M; E64Q or E64D; S65N; E67K; T68E, T68G, or T68H; Q70A or Q70L; D71Q or D71S; I74D, 174E, I74H, or I74Q; D83A or D83G; V84F, V84K, V84M, or V84Q; Y85A or Y85F; R86G; S87C, S87D, or S87K; F88Y, F88N, or F88S; F95M or F95I; Y97F; T98E, T98K, or T98Y; R100A, R100G, R100K, R100N, R100Q, or R100S; and K101A or K101E.

[0098] In some embodiments, the PKC further comprises one or more of the following amino acid substitutions relative to SEQ ID NO: 1: F24M; V46F; Q48A; K49Q; N50F or N50W; V59I or V59F; V61T, V61D, or V61S; V66L, V66M, or V66Y; 169L or 169Y; D71E; I73L; I74S, I74G, or I74L; G80V, G80A, G80E, G80S, G80D, or G80N; F81Y; G82K, G82V, or G82R; D83E, D83K, D83N, D83Q, D83R, or D83S; R86N or R86S; W89V or W89M; and/or I94V. In some embodiments, the PKC comprises at least 6, 7, 8, 9, or 10 amino acid substitutions or deletions relative to SEQ ID NO: 1.

[0099] Each of the limitations of the invention can encompass various embodiments of the invention. It is, therefore, anticipated that each of the limitations of the invention involving any one element or combinations of elements can be included in each aspect of the invention. This disclosure is not limited in its application to the details of construction and the arrangement of components set forth in the following description or illustrated in the drawings. The invention is capable of other embodiments and of being practiced or of being carried out in various ways. Also, the phraseology and terminology used in this application is for the purpose of description and should not be regarded as limiting. The use of “including,” “comprising,” or “having,” “containing,” “involving,” and variations thereof, is meant to encompass the items listed thereafter and equivalents thereof as well as additional items.

### BRIEF DESCRIPTION OF DRAWINGS

[0100] The accompanying drawings are not intended to be drawn to scale. In the drawings, each identical or nearly identical component that is illustrated in various figures is represented by a like numeral. For purposes of clarity, not every component may be labeled in every drawing. In the drawings:

[0101] FIG. 1 is a schematic depicting the native Cannabis biosynthetic pathway for production of cannabinoid compounds, including five enzymatic steps mediated by: (R1a) acyl activating enzymes (AAE); (R2a) olivetol synthase enzymes (OLS); (R3a) olivetolic acid cyclase enzymes (OAC); (R4a) cannabigerolic acid synthase enzymes (CBGAS); and (R5a) terminal synthase enzymes (TS). Formulae 1a-11a correspond to hexanoic acid (1a), hexanoyl-CoA (2a), malonyl-CoA (3a), 3,5,7-trioxododecanoyl-CoA (4a), olivetol (5a), olivetolic acid (6a), geranyl pyrophosphate (7a), cannabigerolic acid (8a), cannabidiolic acid (9a), tetrahydrocannabinolic acid (10a), and cannabichromenic acid (11a). Hexanoic acid is an exemplary carboxylic acid substrate; other carboxylic acids may also be used (e.g., butyric acid, isovaleric acid, octanoic acid, decanoic acid, etc.; see e.g., FIG. 3 below). The enzymes that catalyze the synthesis of 3,5,7-trioxododecanoyl-CoA and olivetolic acid are shown in R2a and R3a, respectively, and can include multi-functional enzymes that catalyze the synthesis of 3,5,7-trioxododecanoyl-CoA and olivetolic acid. The enzymes cannabidiolic acid synthase (CBDAS), tetrahydrocannabinolic acid synthase (THCAS), and cannabichromenic acid synthase (CBCAS) that catalyze the synthesis of cannabidiolic acid, tetrahydrocannabinolic acid, and cannabichromenic acid, respectively, are shown in step R5a. FIG. 1 is adapted from Carvalho et al. “Designing Microorganisms for Heterologous Biosynthesis of Cannabinoids” (2017) FEMS Yeast Research Jun. 1;17(4), which is incorporated by reference in its entirety.

[0102] FIG. 2 is a schematic depicting a heterologous biosynthetic pathway for production of cannabinoid compounds, including five enzymatic steps mediated by: (R1) acyl activating enzymes (AAE); (R2) polyketide synthase enzymes (PKS) or bifunctional polyketide synthase-polyketide cyclase enzymes (PKS—PKC); (R3) polyketide cyclase enzymes (PKC) or bifunctional PKS—PKC enzymes; (R4) prenyltransferase enzymes (PT); and (R5) terminal synthase enzymes (TS). Any carboxylic acid of varying chain lengths, structures (e.g., aliphatic, alicyclic, or aromatic) and functionalization (e.g., hydroxylic-, keto-, amino-, thiol-, aryl-, or alogeno-) may also be used as precursor substrates (e.g., thiopropionic acid, hydroxy phenyl acetic acid, norleucine, bromodecanoic acid, butyric acid, isovaleric acid, octanoic acid, decanoic acid, etc).

[0103] FIG. 3 is a non-exclusive representation of select putative precursors for the cannabinoid pathway in FIG. 2.

[0104] FIG. 4 is a schematic showing a reaction catalyzed by an olivetolic acid cyclase (OAC) enzyme wherein 3,5,7-trioxododecanoyl-CoA (Formula (4a)) is cyclized to form olivetolic acid (OA, Formula (6a)). The spontaneous decarboxylative cyclization of 3,5,7-trioxododecanoyl-CoA to Olivetol (Formula (5a)) is also shown.

[0105] FIG. 5 is a schematic showing a plasmid used to express polyketide cyclase enzymes in S. cerevisiae. The coding sequence for the polyketide cyclase enzymes (labeled “Library gene”) was driven by the GAL1 promoter. The plasmid contains markers for both yeast (URA3) and bacteria (ampR), as well as origins of replication for yeast (2 micron), and bacteria (pBR322).

[0106] FIG. 6 depicts a graph showing olivetolic acid production in S. cerevisiae strains expressing synthetic OAC polypeptides identified in a screen described in Example 1.

[0107] FIGS. 7A-7B depict monomeric crystal structures of CsOAC (SEQ ID NO: 1) with olivetolic acid bound (Protein Data Bank Accession No. 5B09). Olivetolic acid is shown in stick representation in the center. FIG. 7A is a cartoon representation of the CsOAC crystal structure. FIG. 7B is a cartoon representation of the CsOAC crystal structure where positions 73, 74, 80, 82, 84, 86, 87, 88, and 89 are highlighted in sphere representation.

[0108] FIG. 8 depicts a graph comparing olivetol and olivetolic acid production in S. cerevisiae strains in a screen as described in Example 2 and Table 5.

[0109] FIGS. 9A-9B depict results from a secondary screen of S. cerevisiae strains as described in Example 2 and Table 6. FIG. 9A depicts olivetolic acid production. FIG. 9B shows the ratio of olivetolic acid to olivetol. OACs comprising two (double) or three (triple) mutations relative to wild-type CsOAC are shown.

[0110] FIGS. 10A-10B depict results from a screen of S. cerevisiae strains as described in Example 2 and Table 7. FIG. 10A depicts olivetolic acid production. FIG. 10B shows the ratio of olivetolic acid to olivetol.

[0111] FIGS. 11A-11B depict results from a screen of S. cerevisiae strains as described in Example 3 and Table 8. FIG. 11A depicts olivetolic acid production. FIG. 11B shows the ratio of olivetolic acid to olivetol.

[0112] FIGS. 12A-12D depict results from a screen of S. cerevisiae strains as described in Example 4 and Tables 9A-9B. FIG. 12A depicts olivetolic acid production. FIG. 12B shows the ratio of olivetolic acid (OA) to olivetol (OL). FIG. 12C shows olivetolic acid levels normalized to production by the t815900 strain. FIG. 12D shows the ratio of olivetolic acid (OA) to olivetol (OL) normalized to production by the t815900 strain.

### DETAILED DESCRIPTION

[0113] This disclosure provides methods for production of cannabinoids and cannabinoid precursors from fatty acid substrates using genetically modified host cells. Methods include heterologous expression of a polyketide cyclase, such as an olivetolic acid cyclase (OAC). The application describes PKCs that can be functionally expressed in host cells such as S. cerevisiae. As demonstrated in the Examples, PKCs were identified that were capable of producing olivetolic acid (OA) in a host cell. The PKCs described in this disclosure may be useful in increasing the efficiency and purity of cannabinoid production.

### Definitions

[0114] While the following terms are believed to be well understood by one of ordinary skill in the art, the following definitions are set forth to facilitate explanation of the disclosed subject matter.

[0115] The term “a” or “an” refers to one or more of an entity, i.e., can identify a referent as plural. Thus, the terms “a” or “an,” “one or more” and “at least one” are used interchangeably in this application. In addition, reference to “an element” by the indefinite article “a” or “an” does not exclude the possibility that more than one of the elements is present, unless the context clearly requires that there is one and only one of the elements.

[0116] The terms “microorganism” or “microbe” should be taken broadly. These terms are used interchangeably and include, but are not limited to, the two prokaryotic domains, Bacteria and Archaea, as well as certain eukaryotic fungi and protists. In some embodiments, the disclosure may refer to the “microorganisms” or “microbes” of lists/tables and figures present in the disclosure. This characterization can refer to not only the identified taxonomic genera of the tables and figures, but also the identified taxonomic species, as well as the various novel and newly identified or designed strains of any organism in the tables or figures. The same characterization holds true for the recitation of these terms in other parts of the specification, such as in the Examples.

[0117] The term “prokaryotes” is recognized in the art and refers to cells that contain no nucleus or other cell organelles. The prokaryotes are generally classified in one of two domains, the Bacteria and the Archaea.

[0118] “Bacteria” or “eubacteria” refers to a domain of prokaryotic organisms. Bacteria include at least 11 distinct groups as follows: (1) Gram-positive (gram+) bacteria, of which there are two major subdivisions: (a) high G+C group (Actinomycetes, Mycobacteria, Micrococcus, others) and (b) low G+C group (Bacillus, Clostridia, Lactobacillus, Staphylococci, Streptococci, Mycoplasmas); (2) Proteobacteria, e.g., Purple photosynthetic+non-photosynthetic Gram-negative bacteria (includes most “common” Gram-negative bacteria); (3) Cyanobacteria, e.g., oxygenic phototrophs; (4) Spirochetes and related species; (5) Planctomyces; (6) Bacteroides, Flavobacteria; (7) Chlamydia; (8) Green sulfur bacteria; (9) Green non-sulfur bacteria (also anaerobic phototrophs); (10) Radioresistant micrococci and relatives; and (11) Thermotoga and Thermosipho thermophiles.

[0119] The term “Archaea” refers to a taxonomic classification of prokaryotic organisms with certain properties that make them distinct from Bacteria in physiology and phylogeny.

[0120] The term “Cannabis” refers to a genus in the family Cannabaceae. Cannabis is a dioecious plant. Glandular structures located on female flowers of Cannabis, called trichomes, accumulate relatively high amounts of a class of terpeno-phenolic compounds known as phytocannabinoids (described in further detail below). Cannabis has conventionally been cultivated for production of fibre and seed (commonly referred to as “hemp-type”), or for production of intoxicants (commonly referred to as “drug-type”). In drug-type Cannabis, the trichomes contain relatively high amounts of tetrahydrocannabinolic acid (THCA), which can convert to tetrahydrocannabinol (THC) via a decarboxylation reaction, for example upon combustion of dried Cannabis flowers, to provide an intoxicating effect. Drug-type Cannabis often contains other cannabinoids in lesser amounts. In contrast, hemp-type Cannabis contains relatively low concentrations of THCA, often less than 0.3% THC by dry weight. Hemp-type Cannabis may contain non-THC and non-THCA cannabinoids, such as cannabidiolic acid (CBDA), cannabidiol (CBD), and other cannabinoids. Presently, there is a lack of consensus regarding the taxonomic organization of the species within the genus. Unless context dictates otherwise, the term “Cannabis” is intended to include all putative species within the genus, such as, without limitation, Cannabis sativa, Cannabis indica, and Cannabis ruderalis and without regard to whether the Cannabis is hemp-type or drug-type.

[0121] The term “cyclase activity” in reference to a polyketide synthase (PKS) enzyme (e.g., an olivetol synthase (OLS) enzyme) or a polyketide cyclase (PKC) enzyme (e.g., an olivetolic acid cyclase (OAC) enzyme), refers to the activity of catalyzing the cyclization of an oxo fatty acyl-CoA (e.g., 3,5,7-trioxododecanoyl-COA, 3,5,7-trioxodecanoyl-COA) to the corresponding intramolecular cyclization product (e.g., olivetolic acid, divarinic acid). In some embodiments, the PKS catalyzes the C2-C7 aldol condensation of an acyl-COA with three additional ketide moieties added thereto.

[0122] A “cytosolic” or “soluble” enzyme refers to an enzyme that is predominantly localized (or predicted to be localized) in the cytosol of a host cell.

[0123] A “eukaryote” is any organism whose cells contain a nucleus and other organelles enclosed within membranes. Eukaryotes belong to the taxon Eukarya or Eukaryota. The defining feature that sets eukaryotic cells apart from prokaryotic cells (i.e., bacteria and archaea) is that they have membrane-bound organelles, especially the nucleus, which contains the genetic material, and is enclosed by the nuclear envelope.

[0124] The term “host cell” refers to a cell that can be used to express a polynucleotide, such as a polynucleotide that encodes an enzyme used in biosynthesis of cannabinoids or cannabinoid precursors. The terms “genetically modified host cell,” “recombinant host cell,” and “recombinant strain” are used interchangeably and refer to host cells that have been genetically modified by, e.g., cloning and transformation methods, or by other methods known in the art (e.g., selective editing methods, such as CRISPR). Thus, the terms include a host cell (e.g., bacterial cell, yeast cell, fungal cell, insect cell, plant cell, mammalian cell, human cell, etc.) that has been genetically altered, modified, or engineered, so that it exhibits an altered, modified, or different genotype and/or phenotype, as compared to the naturally-occurring cell from which it was derived. It is understood that in some embodiments, the terms refer not only to the particular recombinant host cell in question, but also to the progeny or potential progeny of such a host cell.

[0125] The term “control host cell,” or the term “control” when used in relation to a host cell, refers to an appropriate comparator host cell for determining the effect of a genetic modification or experimental treatment. In some embodiments, the control host cell is a wild type cell. In other embodiments, a control host cell is genetically identical to the genetically modified host cell, except for the genetic modification(s) differentiating the genetically modified or experimental treatment host cell. In some embodiments, the control host cell has been genetically modified to express a wild type or otherwise known variant of an enzyme being tested for activity in other test host cells.

[0126] The term “heterologous” with respect to a polynucleotide, such as a polynucleotide comprising a gene, is used interchangeably with the term “exogenous” and the term “recombinant” and refers to: a polynucleotide that has been artificially supplied to a biological system; a polynucleotide that has been modified within a biological system, or a polynucleotide whose expression or regulation has been manipulated within a biological system. A heterologous polynucleotide that is introduced into or expressed in a host cell may be a polynucleotide that comes from a different organism or species from the host cell, or may be a synthetic polynucleotide, or may be a polynucleotide that is also endogenously expressed in the same organism or species as the host cell. For example, a polynucleotide that is endogenously expressed in a host cell may be considered heterologous when it is situated non-naturally in the host cell; expressed recombinantly in the host cell, either stably or transiently; modified within the host cell; selectively edited within the host cell; expressed in a copy number that differs from the naturally occurring copy number within the host cell; or expressed in a non-natural way within the host cell, such as by manipulating regulatory regions that control expression of the polynucleotide. In some embodiments, a heterologous polynucleotide is a polynucleotide that is endogenously expressed in a host cell but whose expression is driven by a promoter that does not naturally regulate expression of the polynucleotide. In other embodiments, a heterologous polynucleotide is a polynucleotide that is endogenously expressed in a host cell and whose expression is driven by a promoter that does naturally regulate expression of the polynucleotide, but the promoter or another regulatory region is modified. In some embodiments, the promoter is recombinantly activated or repressed. For example, gene-editing based techniques may be used to regulate expression of a polynucleotide, including an endogenous polynucleotide, from a promoter, including an endogenous promoter. See, e.g., Chavez et al., Nat Methods. 2016 July; 13(7): 563-567. A heterologous polynucleotide may comprise a wild-type sequence or a mutant sequence as compared with a reference polynucleotide sequence.

[0127] The term “at least a portion” or “at least a fragment” of a nucleic acid or polypeptide means a portion having the minimal size characteristics of such sequences, or any larger fragment of the full length molecule, up to and including the full length molecule. A fragment of a polynucleotide of the disclosure may encode a biologically active portion of an enzyme, such as a catalytic domain. A biologically active portion of a genetic regulatory element may comprise a portion or fragment of a full length genetic regulatory element and have the same type of activity as the full length genetic regulatory element, although the level of activity of the biologically active portion of the genetic regulatory element may vary compared to the level of activity of the full length genetic regulatory element.

[0128] A coding sequence and a regulatory sequence are said to be “operably joined” or “operably linked” when the coding sequence and the regulatory sequence are covalently linked and the expression or transcription of the coding sequence is under the influence or control of the regulatory sequence. If the coding sequence is to be translated into a functional protein, the coding sequence and the regulatory sequence are said to be operably joined if induction of a promoter in the 5′ regulatory sequence promotes transcription of the coding sequence and if the nature of the linkage between the coding sequence and the regulatory sequence does not (1) result in the introduction of a frame-shift mutation, (2) interfere with the ability of the promoter region to direct the transcription of the coding sequence, or (3) interfere with the ability of the corresponding RNA transcript to be translated into a protein.

[0129] The terms “link,” “linked,” or “linkage” means two entities (e.g., two polynucleotides or two proteins) are bound to one another by any physicochemical means. Any linkage known to those of ordinary skill in the art, covalent or non-covalent, is embraced. In some embodiments, a nucleic acid sequence encoding an enzyme of the disclosure is linked to a nucleic acid encoding a signal peptide. In some embodiments, an enzyme of the disclosure is linked to a signal peptide. Linkage can be direct or indirect.

[0130] The terms “transformed” or “transform” with respect to a host cell refer to a host cell in which one or more nucleic acids have been introduced, for example on a plasmid or vector or by integration into the genome. In some instances where one or more nucleic acids are introduced into a host cell on a plasmid or vector, one or more of the nucleic acids, or fragments thereof, may be retained in the cell, such as by integration into the genome of the cell, while the plasmid or vector itself may be removed from the cell. In such instances, the host cell is considered to be transformed with the nucleic acids that were introduced into the cell regardless of whether the plasmid or vector is retained in the cell or not.

[0131] The term “volumetric productivity” or “production rate” refers to the amount of product formed per volume of medium per unit of time. Volumetric productivity can be reported in gram per liter per hour (g/L/h).

[0132] The term “specific productivity” of a product refers to the rate of formation of the product normalized by unit volume or mass or biomass and has the physical dimension of a quantity of substance per unit time per unit mass or volume [M•T⁻¹•M⁻¹ or M•T⁻¹•L⁻³, where M is mass or moles, T is time, L is length].

[0133] The term “biomass specific productivity” refers to the specific productivity in gram product per gram of cell dry weight (CDW) per hour (g/g CDW/h) or in mmol of product per gram of cell dry weight (CDW) per hour (mmol/g CDW/h). Using the relation of CDW to OD600 for the given microorganism, specific productivity can also be expressed as gram product per liter culture medium per optical density of the culture broth at 600 nm (OD) per hour (g/L/h/OD). Also, if the elemental composition of the biomass is known, biomass specific productivity can be expressed in mmol of product per C-mole (carbon mole) of biomass per hour (mmol/C-mol/h).

[0134] The term “yield” refers to the amount of product obtained per unit weight of a certain substrate and may be expressed as g product per g substrate (g/g) or moles of product per mole of substrate (mol/mol). Yield may also be expressed as a percentage of the theoretical yield. “Theoretical yield” is defined as the maximum amount of product that can be generated per a given amount of substrate as dictated by the stoichiometry of the metabolic pathway used to make the product and may be expressed as g product per g substrate (g/g) or moles of product per mole of substrate (mol/mol).

[0135] The term “titer” refers to the strength of a solution or the concentration of a substance in solution. For example, the titer of a product of interest (e.g., small molecule, peptide, synthetic compound, fuel, alcohol, etc.) in a fermentation broth is described as g of product of interest in solution per liter of fermentation broth or cell-free broth (g/L) or as g of product of interest in solution per kg of fermentation broth or cell-free broth (g/Kg).

[0136] The term “total titer” refers to the sum of all products of interest produced in a process, including but not limited to the products of interest in solution, the products of interest in gas phase if applicable, and any products of interest removed from the process and recovered relative to the initial volume in the process or the operating volume in the process. For example, the total titer of products of interest (e.g., small molecule, peptide, synthetic compound, fuel, alcohol, etc.) in a fermentation broth is described as g of products of interest in solution per liter of fermentation broth or cell-free broth (g/L) or as g of products of interest in solution per kg of fermentation broth or cell-free broth (g/Kg).

[0137] The term “amino acid” refers to organic compounds that comprise an amino group, —NH2, and a carboxyl group, —COOH. The term “amino acid” includes both naturally occurring and unnatural amino acids. Nomenclature for the twenty common amino acids is as follows: alanine (ala or A); arginine (arg or R); asparagine (asn or N); aspartic acid (asp or D); cysteine (cys or C); glutamine (gln or Q); glutamic acid (glu or E); glycine (gly or G); histidine (his or H); isoleucine (ile or I); leucine (leu or L); lysine (lys or K); methionine (met or M); phenylalanine (phe or F); proline (pro or P); serine (ser or S); threonine (thr or T); tryptophan (trp or W); tyrosine (tyr or Y); and valine (val or V). Non-limiting examples of unnatural amino acids include homo-amino acids, proline and pyruvic acid derivatives, 3-substituted alanine derivatives, glycine derivatives, ring-substituted phenylalanine derivatives, ring-substituted tyrosine derivatives, linear core amino acids, amino acids with protecting groups including Fmoc, Boc, and Cbz, β-amino acids (β3 and β2), and N-methyl amino acids.

[0138] The term “aliphatic” refers to alkyl, alkenyl, alkynyl, and carbocyclic groups. Likewise, the term “heteroaliphatic” refers to heteroalkyl, heteroalkenyl, heteroalkynyl, and heterocyclic groups.

[0139] The term “alkyl” refers to a radical of, or a substituent that is, a straight-chain or branched saturated hydrocarbon group having from 1 to 20 carbon atoms (“C1-20 alkyl”). In certain embodiments, the term “alkyl” refers to a radical of, or a substituent that is, a straight-chain or branched saturated hydrocarbon group having from 1 to 10 carbon atoms (“C1-10 alkyl”). In some embodiments, an alkyl group has 1 to 9 carbon atoms (“C₁₋₉ alkyl”). In some embodiments, an alkyl group has 1 to 8 carbon atoms (“C₁₋₈ alkyl”). In some embodiments, an alkyl group has 1 to 7 carbon atoms (“C₁₋₇ alkyl”). In some embodiments, an alkyl group has 2 to 7 carbon atoms (“C₂₋₇ alkyl”). In some embodiments, an alkyl group has 3 to 7 carbon atoms (“C₃₋₇ alkyl”). In some embodiments, an alkyl group has 1 to 6 carbon atoms (“C₁₋₆ alkyl”). In some embodiments, an alkyl group has 2 to 6 carbon atoms (“C₂₋₆ alkyl”). In some embodiments, an alkyl group has 3 to 5 carbon atoms (“C₃₋₅ alkyl”). In some embodiments, an alkyl group has 5 carbon atoms (“C₅ alkyl”). In some embodiments, the alkyl group has 3 carbon atoms (“C3 alkyl”). In some embodiments, the alkyl group has 7 carbon atoms (“C₇ alkyl”). In some embodiments, an alkyl group has 1 to 5 carbon atoms (“C₁₋₅ alkyl”). In some embodiments, an alkyl group has 1 to 4 carbon atoms (“C₁₋₄ alkyl”). In some embodiments, an alkyl group has 1 to 3 carbon atoms (“C₁₋₃ alkyl”). In some embodiments, an alkyl group has 1 to 2 carbon atoms (“C₁₋₂ alkyl”). In some embodiments, an alkyl group has 1 carbon atom (“C1 alkyl”).

[0140] Examples of C₁₋₆ alkyl groups include methyl (C₁), ethyl (C₂), propyl (C₃) (e.g., n-propyl, isopropyl), butyl (C₄) (e.g., n-butyl, tert-butyl, sec-butyl, iso-butyl), pentyl (C₅) (e.g., n-pentyl, 3-pentanyl, amyl, neopentyl, 3-methyl-2-butanyl, tertiary amyl), and hexyl (C₆) (e.g., n-hexyl). Additional examples of alkyl groups include n-heptyl (C₇), n-octyl (C₈), and the like. Unless otherwise specified, each instance of an alkyl group is independently unsubstituted (an “unsubstituted alkyl”) or substituted (a “substituted alkyl”) with one or more substituents (e.g., halogen, such as F). In certain embodiments, the alkyl group is an unsubstituted C₁₋₁₀ alkyl (such as unsubstituted C₁₋₆ alkyl, e.g., —CH₃ (Me), unsubstituted ethyl (Et), unsubstituted propyl (Pr, e.g., unsubstituted n-propyl (n-Pr), unsubstituted isopropyl (i-Pr)), unsubstituted butyl (Bu, e.g., unsubstituted n-butyl (n-Bu), unsubstituted tert-butyl (tert-Bu or t-Bu), unsubstituted sec-butyl (sec-Bu), unsubstituted isobutyl (i-Bu)). In certain embodiments, the alkyl group is a substituted C₁₋₁₀ alkyl (such as substituted C₁₋₆ alkyl, e.g., —CF₃, benzyl).

[0141] The term “acyl” refers to a group having the general formula —C(═O)R^{X1}, —C(═O)OR^{X1}, —C(═O)—O—C(═O)R^{X1}, —C(═O)SR^{X1}, —C(═O)N(R^{X1})₂, —C(═S)R^{X1}, —C(═S)N(R^{X1})₂, and —C(═S)S(R^{X1}), —C(═NR^{X1})R^{X1}, —C(═NR^{X1})OR^{X1}, —C(═NR^{X1})SR^{X1}, and —C(═NR^{X1})N(R^{X1})₂, wherein Rx¹ is hydrogen; halogen; substituted or unsubstituted hydroxyl; substituted or unsubstituted thiol; substituted or unsubstituted amino; substituted or unsubstituted acyl, cyclic or acyclic, substituted or unsubstituted, branched or unbranched aliphatic; cyclic or acyclic, substituted or unsubstituted, branched or unbranched heteroaliphatic; cyclic or acyclic, substituted or unsubstituted, branched or unbranched alkyl; cyclic or acyclic, substituted or unsubstituted, branched or unbranched alkenyl; substituted or unsubstituted alkynyl; substituted or unsubstituted aryl, substituted or unsubstituted heteroaryl, aliphaticoxy, heteroaliphaticoxy, alkyloxy, heteroalkyloxy, aryloxy, heteroaryloxy, aliphaticthioxy, heteroaliphaticthioxy, alkylthioxy, heteroalkylthioxy, arylthioxy, heteroarylthioxy, mono- or di- aliphaticamino, mono- or di- heteroaliphaticamino, mono- or di- alkylamino, mono- or di- heteroalkylamino, mono- or di-arylamino, or mono- or di-heteroarylamino; or two R^{X1} groups taken together form a 5- to 6-membered heterocyclic ring. Exemplary acyl groups include aldehydes (—CHO), carboxylic acids (—CO₂H), ketones, acyl halides, esters, amides, imines, carbonates, carbamates, and ureas. Acyl substituents include, but are not limited to, any of the substituents described in this application that result in the formation of a stable moiety (e.g., aliphatic, alkyl, alkenyl, alkynyl, heteroaliphatic, heterocyclic, aryl, heteroaryl, acyl, oxo, imino, thiooxo, cyano, isocyano, amino, azido, nitro, hydroxyl, thiol, halo, aliphaticamino, heteroaliphaticamino, alkylamino, heteroalkylamino, arylamino, heteroarylamino, alkylaryl, arylalkyl, aliphaticoxy, heteroaliphaticoxy, alkyloxy, heteroalkyloxy, aryloxy, heteroaryloxy, aliphaticthioxy, heteroaliphaticthioxy, alkylthioxy, heteroalkylthioxy, arylthioxy, heteroarylthioxy, acyloxy, and the like, each of which may or may not be further substituted).

[0142] “Alkenyl” refers to a radical of, or a substituent that is, a straight-chain or branched hydrocarbon group having from 2 to 20 carbon atoms, one or more carbon-carbon double bonds, and no triple bonds (“C₂₋₂₀ alkenyl”). In some embodiments, an alkenyl group has 2 to 10 carbon atoms (“C₂₋₁₀ alkenyl”). In some embodiments, an alkenyl group has 2 to 9 carbon atoms (“C₂₋₉ alkenyl”). In some embodiments, an alkenyl group has 2 to 8 carbon atoms (“C2-s alkenyl”). In some embodiments, an alkenyl group has 2 to 7 carbon atoms (“C₂₋₇ alkenyl”). In some embodiments, an alkenyl group has 2 to 6 carbon atoms (“C₂₋₆ alkenyl”). In some embodiments, an alkenyl group has 2 to 5 carbon atoms (“C₂₋₅ alkenyl”). In some embodiments, an alkenyl group has 2 to 4 carbon atoms (“C₂₋₄ alkenyl”). In some embodiments, an alkenyl group has 2 to 3 carbon atoms (“C₂₋₃ alkenyl”). In some embodiments, an alkenyl group has 2 carbon atoms (“C₂ alkenyl”). The one or more carbon-carbon double bonds can be internal (such as in 2-butenyl) or terminal (such as in 1-butenyl). Examples of C₂₋₄ alkenyl groups include ethenyl (C₂), 1-propenyl (C₃), 2-propenyl (C₃), 1-butenyl (C₄), 2-butenyl (C₄), butadienyl (C₄), and the like. Examples of C2-6 alkenyl groups include the aforementioned C₂₋₄ alkenyl groups as well as pentenyl (C₅), pentadienyl (C₅), hexenyl (C₆), and the like. Additional examples of alkenyl include heptenyl (C₇), octenyl (C₈), octatrienyl (C₈), and the like. Unless otherwise specified, each instance of an alkenyl group is independently optionally substituted, i.e., unsubstituted (an “unsubstituted alkenyl”) or substituted (a “substituted alkenyl”) with one or more substituents. In certain embodiments, the alkenyl group is unsubstituted C₂₋₁₀ alkenyl. In certain embodiments, the alkenyl group is substituted C₂₋₁₀ alkenyl.

[0143] “Alkynyl” refers to a radical of, or a substituent that is, a straight-chain or branched hydrocarbon group having from 2 to 20 carbon atoms, one or more carbon-carbon triple bonds, and optionally one or more double bonds (“C₂₋₂₀ alkynyl”). In some embodiments, an alkynyl group has 2 to 10 carbon atoms (“C₂₋₁₀ alkynyl”). In some embodiments, an alkynyl group has 2 to 9 carbon atoms (“C₂₋₉ alkynyl”). In some embodiments, an alkynyl group has 2 to 8 carbon atoms (“C₂₋₈ alkynyl”). In some embodiments, an alkynyl group has 2 to 7 carbon atoms (“C₂₋₇ alkynyl”). In some embodiments, an alkynyl group has 2 to 6 carbon atoms (“C₂₋₆ alkynyl”). In some embodiments, an alkynyl group has 2 to 5 carbon atoms (“C₂₋₅ alkynyl”). In some embodiments, an alkynyl group has 2 to 4 carbon atoms (“C₂₋₄ alkynyl”). In some embodiments, an alkynyl group has 2 to 3 carbon atoms (“C₂₋₃ alkynyl”). In some embodiments, an alkynyl group has 2 carbon atoms (“C₂ alkynyl”). The one or more carbon-carbon triple bonds can be internal (such as in 2-butynyl) or terminal (such as in 1-butynyl). Examples of C₂₋₄ alkynyl groups include, without limitation, ethynyl (C₂), 1-propynyl (C₃), 2-propynyl (C₃), 1-butynyl (C₄), 2-butynyl (C₄), and the like. Examples of C2-6 alkenyl groups include the aforementioned C₂₋₄ alkynyl groups as well as pentynyl (C₅), hexynyl (C₆), and the like. Additional examples of alkynyl include heptynyl (C₇), octynyl (C₈), and the like. Unless otherwise specified, each instance of an alkynyl group is independently optionally substituted, i.e., unsubstituted (an “unsubstituted alkynyl”) or substituted (a “substituted alkynyl”) with one or more substituents. In certain embodiments, the alkynyl group is unsubstituted C₂₋₁₀ alkynyl. In certain embodiments, the alkynyl group is substituted C₂₋₁₀ alkynyl.

[0144] “Carbocyclyl” or “carbocyclic” refers to a radical of a non-aromatic cyclic hydrocarbon group having from 3 to 10 ring carbon atoms (“C3-10 carbocyclyl”) and zero heteroatoms in the non-aromatic ring system. In some embodiments, a carbocyclyl group has 3 to 8 ring carbon atoms (“C₃₋₈ carbocyclyl”). In some embodiments, a carbocyclyl group has 3 to 6 ring carbon atoms (“C₃₋₆ carbocyclyl”). In some embodiments, a carbocyclyl group has 3 to 6 ring carbon atoms (“C₃₋₆ carbocyclyl”). In some embodiments, a carbocyclyl group has 5 to 10 ring carbon atoms (“C₅₋₁₀ carbocyclyl”). Exemplary C₃₋₆ carbocyclyl groups include, without limitation, cyclopropyl (C₃), cyclopropenyl (C₃), cyclobutyl (C₄), cyclobutenyl (C₄), cyclopentyl (C₅), cyclopentenyl (C₅), cyclohexyl (C₆), cyclohexenyl (C₆), cyclohexadienyl (C₆), and the like. Exemplary C₃₋₈ carbocyclyl groups include, without limitation, the aforementioned C₃₋₆ carbocyclyl groups as well as cycloheptyl (C₇), cycloheptenyl (C₇), cycloheptadienyl (C₇), cycloheptatrienyl (C₇), cyclooctyl (C₈), cyclooctenyl (C₈), bicyclo[2.2.1]heptanyl (C₇), bicyclo[2.2.2]octanyl (C₈), and the like. Exemplary C₃₋₁₀ carbocyclyl groups include, without limitation, the aforementioned C₃₋₈ carbocyclyl groups as well as cyclononyl (C₉), cyclononenyl (C₉), cyclodecyl (C₁₀), cyclodecenyl (C₁₀), octahydro-1H-indenyl (C₉), decahydronaphthalenyl (C₁₀), spiro[4.5]decanyl (C₁₀), and the like. As the foregoing examples illustrate, in certain embodiments, the carbocyclyl group is either monocyclic (“monocyclic carbocyclyl”) or contain a fused, bridged or spiro ring system such as a bicyclic system (“bicyclic carbocyclyl”) and can be saturated or can be partially unsaturated. “Carbocyclyl” also includes ring systems wherein the carbocyclic ring, as defined above, is fused with one or more aryl or heteroaryl groups wherein the point of attachment is on the carbocyclic ring, and in such instances, the number of carbons continue to designate the number of carbons in the carbocyclic ring system. Unless otherwise specified, each instance of a carbocyclyl group is independently optionally substituted, i.e., unsubstituted (an “unsubstituted carbocyclyl”) or substituted (a “substituted carbocyclyl”) with one or more substituents. In certain embodiments, the carbocyclyl group is unsubstituted C₃₋₁₀ carbocyclyl. In certain embodiments, the carbocyclyl group is a substituted C₃₋₁₀ carbocyclyl.

[0145] In some embodiments, “carbocyclyl” is a monocyclic, saturated carbocyclyl group having from 3 to 10 ring carbon atoms (“C₃₋₁₀ cycloalkyl”). In some embodiments, a cycloalkyl group has 3 to 8 ring carbon atoms (“C₃₋₈ cycloalkyl”). In some embodiments, a cycloalkyl group has 3 to 6 ring carbon atoms (“C₃₋₆ cycloalkyl”). In some embodiments, a cycloalkyl group has 5 to 6 ring carbon atoms (“C₅6 cycloalkyl”). In some embodiments, a cycloalkyl group has 5 to 10 ring carbon atoms (“C₅₋₁₀ cycloalkyl”). Examples of C₅6 cycloalkyl groups include cyclopentyl (C₅) and cyclohexyl (C₅). Examples of C₃₋₆ cycloalkyl groups include the aforementioned C₅₋₆ cycloalkyl groups as well as cyclopropyl (C₃) and cyclobutyl (C₄). Examples of C₃₋₈ cycloalkyl groups include the aforementioned C₃₋₆ cycloalkyl groups as well as cycloheptyl (C₇) and cyclooctyl (C₈). Unless otherwise specified, each instance of a cycloalkyl group is independently unsubstituted (an “unsubstituted cycloalkyl”) or substituted (a “substituted cycloalkyl”) with one or more substituents. In certain embodiments, the cycloalkyl group is unsubstituted C₃₋₁₀ cycloalkyl. In certain embodiments, the cycloalkyl group is substituted C₃₋₁₀ cycloalkyl.

[0146] “Aryl” refers to a radical of a monocyclic or polycyclic (e.g., bicyclic or tricyclic) 4n+2 aromatic ring system (e.g., having 6, 10, or 14 pi electrons shared in a cyclic array) having 6-14 ring carbon atoms and zero heteroatoms provided in the aromatic ring system (“C₆₋₁₄ aryl”). In some embodiments, an aryl group has six ring carbon atoms (“C₆ aryl”; e.g., phenyl). In some embodiments, an aryl group has ten ring carbon atoms (“C₁₀ aryl”; e.g., naphthyl such as 1-naphthyl and 2-naphthyl). In some embodiments, an aryl group has fourteen ring carbon atoms (“C₁₄ aryl”; e.g., anthracyl). “Aryl” also includes ring systems wherein the aryl ring, as defined above, is fused with one or more carbocyclyl or heterocyclyl groups wherein the radical or point of attachment is on the aryl ring, and in such instances, the number of carbon atoms continue to designate the number of carbon atoms in the aryl ring system. Unless otherwise specified, each instance of an aryl group is independently optionally substituted, i.e., unsubstituted (an “unsubstituted aryl”) or substituted (a “substituted aryl”) with one or more substituents. In certain embodiments, the aryl group is unsubstituted C₆₋₁₄ aryl. In certain embodiments, the aryl group is substituted C₆₋₁₄ aryl.

[0147] “Aralkyl” is a subset of alkyl and aryl and refers to an optionally substituted alkyl group substituted by an optionally substituted aryl group. In certain embodiments, the aralkyl is optionally substituted benzyl. In certain embodiments, the aralkyl is benzyl. In certain embodiments, the aralkyl is optionally substituted phenethyl. In certain embodiments, the aralkyl is phenethyl. In certain embodiments, the aralkyl is 7-phenylheptanyl. In certain embodiments, the aralkyl is C7 alkyl substituted by an optionally substituted aryl group (e.g., phenyl). In certain embodiments, the aralkyl is a C7-C10 alkyl group substituted by an optionally substituted aryl group (e.g., phenyl).

[0148] “Partially unsaturated” refers to a group that includes at least one double or triple bond. A “partially unsaturated” ring system is further intended to encompass rings having multiple sites of unsaturation but is not intended to include aromatic groups (e.g., aryl or heteroaryl groups) as defined in this application. Likewise, “saturated” refers to a group that does not contain a double or triple bond, i.e., contains all single bonds.

[0149] The term “optionally substituted” means substituted or unsubstituted.

[0150] Alkyl, alkenyl, alkynyl, carbocyclyl, heterocyclyl, aryl, and heteroaryl groups are optionally substituted (e.g., “substituted” or “unsubstituted” alkyl, “substituted” or “unsubstituted” alkenyl, “substituted” or “unsubstituted” alkynyl, “substituted” or “unsubstituted” carbocyclyl, “substituted” or “unsubstituted” heterocyclyl, “substituted” or “unsubstituted” aryl or “substituted” or “unsubstituted” heteroaryl group). In general, the term “substituted,” whether preceded by the term “optionally” or not, means that at least one hydrogen present on a group (e.g., a carbon or nitrogen atom) is replaced with a permissible substituent, e.g., a substituent which upon substitution results in a stable compound, e.g., a compound which does not spontaneously undergo transformation such as by rearrangement, cyclization, elimination, or other reaction. Unless otherwise indicated, a “substituted” group has a substituent at one or more substitutable positions of the group, and when more than one position in any given structure is substituted, the substituent is either the same or different at each position. The term “substituted” is contemplated to include substitution with all permissible substituents of organic compounds, any of the substituents described in this application that results in the formation of a stable compound. The present invention contemplates any and all such combinations in order to arrive at a stable compound. For purposes of this invention, heteroatoms such as nitrogen may have hydrogen substituents and/or any suitable substituent as described in this application which satisfy the valencies of the heteroatoms and results in the formation of a stable moiety.

[0151] Exemplary carbon atom substituents include, but are not limited to, halogen, —CN, —NO₂, —N₃, —SO₂H, —SO₃H, —OH, —OR^{aa}, —ON(R^{bb})₂, —N(R^{bb})₂, —N(R^{bb})₃⁺X⁻, —N(OR^{cc})R^{bb}, —SH, —SR^{aa}, —SSR^{cc}, —C(═O)R^{aa}, —CO₂H, —CHO, —C(OR^{cc})₂, —CO₂R^{aa}, —OC(═O)R^{aa}, —OCO₂R^{aa}, —C(═O)N(R^{bb})₂, —OC(═O)N(R^{bb})₂, —NR^{bb}C(═O)R^{aa}, —NR^{bb}CO₂R^{aa}, —NR^{bb}C(═O)N(R^{bb})₂, —C(═NR^{bb})R—, —C(═NR^{bb})OR^{aa}, —OC(═NR^{bb})R^{aa}, —OC(═NR^{bb})OR^{aa}, —C(═NR^{bb})N(R^{bb})₂, —OC(═NR^{bb})N(R^{bb})₂, —NR^{bb}C(═NR^{bb})N(R^{bb})₂, —C(═O)NR^{bb}SO₂R—, —NR^{bb}SO₂R^{aa}, —SO₂N(R^{bb})₂, —SO₂R^{aa}, —SO₂OR^{aa}, —OSO₂R^{aa}, —S(═O)R^{aa}, —OS(═O)R^{aa}, —Si(R^{aa})₃, —OSi(R^{aa})₃—C(═S)N(R^{bb})₂, —C(═O)SR^{aa}, —C(═S)SR^{aa}, —SC(═S)SR^{aa}, —SC(═O)SR^{aa}, —OC(═O)SR^{aa}, —SC(═O)OR^{aa}, —SC(═O)R^{aa}, —P(═O)(R^{aa})₂, —P(═O)(OR^{cc})₂, —OP(═O)(R^{aa})₂, —OP(═O)(OR^{cc})₂, —P(═O)(N(R^{bb})₂)₂, —OP(═O)(N(R^{bb})₂)₂, —NR^{bb}P(═O)(R^{aa})₂, —NR^{bb}P(═O)(OR^{cc})₂, —NR^{bb}P(═O)(N(R^{bb})₂)₂, —P(R^{cc})₂, —P(OR^{cc})₂, —P(R^{cc})₃⁺X⁻, —P(OR^{bb})₃⁺X⁻, —P(R^{cc})₄, —P(OR^{cc})₄, —OP(R^{cc})₂, —OP(R^{cc})₃⁺X⁻, —OP(OR^{cc})₂, —OP(OR^{cc})₃⁺X⁻, —OP(R^{cc})₄, —OP(OR^{cc})₄, —B(R^{aa})₂, —B(OR^{cc})₂, —BR^{aa}(OR^{cc}), C₁₋₁₀ alkyl, C₁₋₁₀ perhaloalkyl, C₂₋₁₀ alkenyl, C₂₋₁₀ alkynyl, heteroC₁₋₁₀ alkyl, heteroC₂₋₁₀ alkenyl, heteroC₂₋₁₀ alkynyl, C₃₋₁₀ carbocyclyl, 3-14 membered heterocyclyl, C₆₋₁₄ aryl, and 5-14 membered heteroaryl;

wherein:
[0152] each instance of R^{aa} is, independently, selected from C₁₋₁₀ alkyl, C₁₋₁₀ perhaloalkyl, C₂₋₁₀ alkenyl, C₂₋₁₀ alkynyl, heteroC₁₋₁₀ alkyl, heteroC₂₋₁₀alkenyl, heteroC₂₋₁₀alkynyl, C₃₋₁₀ carbocyclyl, 3-14 membered heterocyclyl, C₆₋₁₄ aryl, and 5-14 membered heteroaryl, or two R^{aa} groups are joined to form a 3-14 membered heterocyclyl or 5-14 membered heteroaryl ring, wherein each alkyl, alkenyl, alkynyl, heteroalkyl, heteroalkenyl, heteroalkynyl, carbocyclyl, heterocyclyl, aryl, and heteroaryl is independently substituted with 0, 1, 2, 3, 4, or 5 R^{dd} groups;
[0153] each instance of R^{bb} is, independently, selected from hydrogen, —OH, —OR^{aa}, —N(R^{cc})₂, —CN, —C(═O)R^{aa}, —C(═O)N(R^{cc})₂, —CO₂R^{aa}, —SO₂R^{aa}, —C(═NR^{cc})OR^{aa}, —C(═NR^{cc})N(R^{cc})₂, —SO₂N(R^{cc})₂, —SO₂R^{cc}, —SO₂OR^{cc}, —SOR^{aa}, —C(═S)N(R^{cc})₂, —C(═O)SR^{cc}, —C(═S)SR^{cc}, —P(═O)(R^{aa})₂, —P(═O)(OR^{cc})₂, —P(═O)(N(R^{cc})₂)₂, C₁₋₁₀ alkyl, C₁₋₁₀ perhaloalkyl, C₂₋₁₀ alkenyl, C₂₋₁₀ alkynyl, heteroC₁₋₁₀alkyl, heteroC₂₋₁₀alkenyl, heteroC₂₋₁₀alkynyl, C₃₋₁₀ carbocyclyl, 3-14 membered heterocyclyl, C₆₋₁₄ aryl, and 5-14 membered heteroaryl, or two R^{bb} groups are joined to form a 3-14 membered heterocyclyl or 5-14 membered heteroaryl ring, wherein each alkyl, alkenyl, alkynyl, heteroalkyl, heteroalkenyl, heteroalkynyl, carbocyclyl, heterocyclyl, aryl, and heteroaryl is independently substituted with 0, 1, 2, 3, 4, or 5 R^{dd} groups; wherein X— is a counterion;
[0154] each instance of R^{cc} is, independently, selected from hydrogen, C₁₋₁₀ alkyl, C₁₋₁₀ perhaloalkyl, C₂₋₁₀ alkenyl, C₂₋₁₀ alkynyl, heteroC₁₋₁₀ alkyl, heteroC₂₋₁₀ alkenyl, heteroC₂₋₁₀ alkynyl, C₃₋₁₀ carbocyclyl, 3-14 membered heterocyclyl, C₆₋₁₄ aryl, and 5-14 membered heteroaryl, or two R^{cc} groups are joined to form a 3-14 membered heterocyclyl or 5-14 membered heteroaryl ring, wherein each alkyl, alkenyl, alkynyl, heteroalkyl, heteroalkenyl, heteroalkynyl, carbocyclyl, heterocyclyl, aryl, and heteroaryl is independently substituted with 0, 1, 2, 3, 4, or 5 R^{dd} groups;
[0155] each instance of R^{dd} is, independently, selected from halogen, —CN, —NO₂, —N₃, —SO₂H, —SO₃H, —OH, —OR^{ee}, —ON(R^{ff})₂, —N(R^{ff})₂, —N(R^{ff})₃⁺X⁻, —N(OR^{ee})R^{ff}, —SH, —SR^{ee}, —SSR^{ee}, —C(═O)R^{ee}, —CO₂H, —CO₂R^{ee}, —OC(═O)R^{ee}, —OCO₂R^{ee}, —C(═O)N(R^{ff})₂, —OC(═O)N(R^{ff})₂, —NR^{ff}C(═O)R^{ee}, —NR^{ff}CO₂R^{ee}, —NR^{ff}C(═O)N(R^{ff})₂, —C(═NR^{ff})OR^{ee}, —OC(═NR^{ff})R^{ee}, —OC(═NR^{ff})OR^{ee}, —C(═NR^{ff})N(R^{ff})₂, —OC(═NR^{ff})N(R^{ff})₂, —NR^{ff}C(═NR^{ff})N(R^{ff})₂, —NR^{ff}SO₂R^{ee}, —SO₂N(R^{ff})₂, —SO₂R^{ee}, —SO₂OR^{ee}, —OSO₂R^{ee}, —S(═O)R^{ee}, —Si(R^{ee})₃, —OSi(R^{ee})₃, —C(═S)N(R^{ff})₂, —C(═O)SR^{ee}, —C(═S)SR^{ee}, —SC(═S)SR^{ee}, —P(═O)(OR^{ee})₂, —P(═O)(R^{ee})₂, —OP(═O)(R^{ee})₂, —OP(═O)(OR^{ee})₂, C₁₋₆ alkyl, C₁₋₆ perhaloalkyl, C₂₋₆ alkenyl, C₂₋₆ alkynyl, heteroC₁₋₆alkyl, heteroC₂₋₆alkenyl, heteroC₂₋₆alkynyl, C₃₋₁₀ carbocyclyl, 3-10 membered heterocyclyl, C₆₋₁₀ aryl, 5-10 membered heteroaryl, wherein each alkyl, alkenyl, alkynyl, heteroalkyl, heteroalkenyl, heteroalkynyl, carbocyclyl, heterocyclyl, aryl, and heteroaryl is independently substituted with 0, 1, 2, 3, 4, or 5 R^{gg} groups, or two geminal R^{dd} substituents can be joined to form ═O or ═S; wherein X⁻ is a counterion;
[0156] each instance of R^{ee} is, independently, selected from C₁₋₆ alkyl, C₁₋₆ perhaloalkyl, C₂₋₆ alkenyl, C₂₋₆ alkynyl, heteroC₁₋₆alkyl, heteroC₂₋₆alkenyl, heteroC₂₋₆alkynyl, C₃₋₁₀ carbocyclyl, C₆₋₁₀ aryl, 3-10 membered heterocyclyl, and 3-10 membered heteroaryl, wherein each alkyl, alkenyl, alkynyl, heteroalkyl, heteroalkenyl, heteroalkynyl, carbocyclyl, heterocyclyl, aryl, and heteroaryl is independently substituted with 0, 1, 2, 3, 4, or 5 R^{gg} groups;
[0157] each instance of R^{ff} is, independently, selected from hydrogen, C₁₋₆ alkyl, C₁₋₆ perhaloalkyl, C₂₋₆ alkenyl, C₂₋₆ alkynyl, heteroC₁₋₆alkyl, heteroC₂₋₆alkenyl, heteroC₂₋₆alkynyl, C₃₋₁₀ carbocyclyl, 3-10 membered heterocyclyl, C₆₋₁₀ aryl and 5-10 membered heteroaryl, or two R^{ff} groups are joined to form a 3-10 membered heterocyclyl or 5-10 membered heteroaryl ring, wherein each alkyl, alkenyl, alkynyl, heteroalkyl, heteroalkenyl, heteroalkynyl, carbocyclyl, heterocyclyl, aryl, and heteroaryl is independently substituted with 0, 1, 2, 3, 4, or 5 R^{gg} groups; and
[0158] each instance of R^{gg} is, independently, halogen, —CN, —NO₂, —N₃, —SO₂H, —SO₃H, —OH, —OC₁₋₆ alkyl, —ON(C₁₋₆ alkyl)₂, —N(C₁₋₆ alkyl)₂, —N(C₁₋₆ alkyl)₃⁺X⁻, —NH(C₁₋₆ alkyl)₂⁺X⁻, —NH2(C₁₋₆ alkyl)⁺X⁻, —NH₃⁺X⁻, —N(OC₁₋₆ alkyl)(C₁₋₆ alkyl), —N(OH)(C₁₋₆ alkyl), —NH(OH), —SH, —SC₁₋₆ alkyl, —SS(C₁₋₆ alkyl), —C(═O)(C₁₋₆ alkyl), —CO₂H, —CO₂(C₁₋₆ alkyl), —OC(═O)(C₁₋₆ alkyl), —OCO₂(C₁₋₆ alkyl), —C(═O)NH2, —C(═O)N(C₁₋₆ alkyl)₂, —OC(═O)NH(C₁₋₆ alkyl), —NHC(═O)(C₁₋₆ alkyl), —N(C₁₋₆ alkyl)C(═O)(C₁₋₆ alkyl), —NHCO₂(C₁₋₆ alkyl), —NHC(═O)N(C₁₋₆ alkyl)₂, —NHC(═O)NH(C₁₋₆ alkyl), —NHC(═O)NH₂, —C(═NH)O(C₁₋₆ alkyl), —OC(═NH)(C₁₋₆ alkyl), —OC(═NH)OC₁₋₆ alkyl, —C(═NH)N(C₁₋₆ alkyl)₂, —C(═NH)NH(C₁₋₆ alkyl), —C(═NH)NH₂, —OC(═NH)N(C₁₋₆ alkyl)₂, —OC(NH)NH(C₁₋₆ alkyl), —OC(NH)NH₂, —NHC(NH)N(C₁₋₆ alkyl)₂, —NHC(═NH)NH₂, —NHSO₂(C₁₋₆ alkyl), —SO₂N(C₁₋₆ alkyl)₂, —SO₂NH(C₁₋₆ alkyl), —SO₂NH₂, —SO₂C₁₋₆ alkyl, —SO₂OC₁₋₆ alkyl, —OSO₂C₁₋₆ alkyl, —SOC₁₋₆ alkyl, —Si(C₁₋₆ alkyl)₃, —OSi(C₁₋₆ alkyl)₃—C(═S)N(C₁₋₆ alkyl)₂, C(═S)NH(C₁₋₆ alkyl), C(═S)NH2, —C(═O)S(C₁₋₆ alkyl), —C(═S)SC₁₋₆ alkyl, —SC(═S)SC₁₋₆ alkyl, —P(═O)(OC₁₋₆ alkyl)₂, —P(═O)(C₁₋₆ alkyl)₂, —OP(═O)(C₁₋₆ alkyl)₂, —OP(═O)(OC₁₋₆ alkyl)₂, C₁₋₆ alkyl, C₁₋₆ perhaloalkyl, C₂₋₆ alkenyl, C₂₋₆ alkynyl, heteroC₁₋₆alkyl, heteroC₂₋₆alkenyl, heteroC₂₋₆alkynyl, C₃₋₁₀ carbocyclyl, C₆₋₁₀ aryl, 3-10 membered heterocyclyl, 5-10 membered heteroaryl; or two geminal R^{gg} substituents can be joined to form ═O or ═S; wherein X⁻ is a counterion. Alternatively, two geminal hydrogens on a carbon atom are replaced with the group ═O, ═S, ═NN(R^{bb})₂, ═NNR^{bb}C(═O)R^{aa}, ═NNR^{bb}C(═O)OR^{aa}, ═NNR^{bb}S(═O)₂R^{aa}, ═NR^{bb}, or ═NOR^{cc}; wherein each alkyl, alkenyl, alkynyl, heteroalkyl, heteroalkenyl, heteroalkynyl, carbocyclyl, heterocyclyl, aryl, and heteroaryl is independently substituted with 0, 1, 2, 3, 4, or 5 R^{dd} groups; wherein X⁻ is a counterion;
   wherein:
[0159] each instance of R^{aa} is, independently, selected from C₁₋₁₀ alkyl, C₁₋₁₀ perhaloalkyl, C₂₋₁₀ alkenyl, C₂₋₁₀ alkynyl, heteroC₁₋₁₀ alkyl, heteroC₂₋₁₀alkenyl, heteroC₂₋₁₀alkynyl, C₃₋₁₀ carbocyclyl, 3-14 membered heterocyclyl, C₆₋₁₄ aryl, and 5-14 membered heteroaryl, or two R^{aa} groups are joined to form a 3-14 membered heterocyclyl or 5-14 membered heteroaryl ring, wherein each alkyl, alkenyl, alkynyl, heteroalkyl, heteroalkenyl, heteroalkynyl, carbocyclyl, heterocyclyl, aryl, and heteroaryl is independently substituted with 0, 1, 2, 3, 4, or 5 R^{dd} groups;
[0160] each instance of R^{bb} is, independently, selected from hydrogen, —OH, —OR^{aa}, —N(R^{cc})₂, —CN, —C(═O)R^{aa}, —C(═O)N(R^{cc})₂, —CO₂R^{cc}, —SO₂R^{cc}, —C(═NR^{cc})OR^{aa}, —C(═NR^{cc})N(R^{cc})₂, —SO₂N(R^{cc})₂, —SO₂R^{cc}, —SO₂OR^{cc}, —SOR^{aa}, —C(═S)N(R^{cc})₂, —C(═O)SR^{cc}, —C(═S)SR^{cc}, —P(═O)(R^{aa})₂, —P(═O)(OR^{cc})₂, —P(═O)(N(R^{cc})₂)₂, C₁₋₁₀ alkyl, C₁₋₁₀ perhaloalkyl, C₂₋₁₀ alkenyl, C₂₋₁₀ alkynyl, heteroC₁₋₁₀alkyl, heteroC₂₋₁₀alkenyl, heteroC₂₋₁₀alkynyl, C₃₋₁₀ carbocyclyl, 3-14 membered heterocyclyl, C₆₋₁₄ aryl, and 5-14 membered heteroaryl, or two R^{bb} groups are joined to form a 3-14 membered heterocyclyl or 5-14 membered heteroaryl ring, wherein each alkyl, alkenyl, alkynyl, heteroalkyl, heteroalkenyl, heteroalkynyl, carbocyclyl, heterocyclyl, aryl, and heteroaryl is independently substituted with 0, 1, 2, 3, 4, or 5 R^{dd} groups; wherein X⁻ is a counterion;
[0161] each instance of R^{cc} is, independently, selected from hydrogen, C₁₋₁₀ alkyl, C₁₋₁₀ perhaloalkyl, C₂₋₁₀ alkenyl, C₂₋₁₀ alkynyl, heteroC₁₋₁₀ alkyl, heteroC₂₋₁₀ alkenyl, heteroC₂₋₁₀ alkynyl, C₃₋₁₀ carbocyclyl, 3-14 membered heterocyclyl, C₆₋₁₄ aryl, and 5-14 membered heteroaryl, or two R^{cc} groups are joined to form a 3-14 membered heterocyclyl or 5-14 membered heteroaryl ring, wherein each alkyl, alkenyl, alkynyl, heteroalkyl, heteroalkenyl, heteroalkynyl, carbocyclyl, heterocyclyl, aryl, and heteroaryl is independently substituted with 0, 1, 2, 3, 4, or 5 R^{dd} groups;
[0162] each instance of R^{dd} is, independently, selected from halogen, —CN, —NO₂, —N₃, —SO₂H, —SO₃H, —OH, —OR^{ee}, —ON(R^{ff})₂, —N(R^{ff})₂, —N(R^{ff})₃⁺X⁻, —N(OR^{ee})R^{ff}, —SH, —SR^{ee}, —SSR^{ee}, —C(═O)R^{ee}, —CO₂H, —CO₂R^{ee}, —OC(═O)R^{ee}, —OCO₂R^{ee}, —C(═O)N(R^{ff})₂, —OC(═O)N(R^{ff})₂, —NR^{ff}C(═O)R^{ee}, —NR^{ff}CO₂R^{ee}, —NR^{ff}C(═)N(R)₂, —C(═NR^{ff})OR^{ee}, —OC(═NR^{ff})R^{ee}, —OC(═NR^{ff})OR^{ee}, —C(═NR^{ff})N(R^{ff})₂, —OC(═NR^{ff})N(R^{ff})₂, —NR^{ff}C(═NR^{ff})N(R^{ff})₂, —NR^{ff}SO₂R^{ee}, —SO₂N(R^{ff})₂, —SO₂R^{ee}, —SO₂OR^{ee}, —OSO₂R^{ee}, —S(═O)R^{ee}, —Si(R^{ee})₃, —OSi(R^{ee})₃, —C(═S)N(R^{ff})₂, —C(═O)SR^{ee}, —C(═S)SR^{ee}, —SC(═S)SR^{ee}, —P(═O)(OR^{ee})₂, —P(═O)(R^{ee})₂, —OP(═O)(R^{ee})₂, —OP(═O)(OR^{ee})₂, C₁₋₆ alkyl, C₁₋₆ perhaloalkyl, C₂₋₆ alkenyl, C₂₋₆ alkynyl, heteroC₁₋₆alkyl, heteroC₂₋₆alkenyl, heteroC₂₋₆alkynyl, C₃₋₁₀ carbocyclyl, 3-10 membered heterocyclyl, C₆₋₁₀ aryl, 5-10 membered heteroaryl, wherein each alkyl, alkenyl, alkynyl, heteroalkyl, heteroalkenyl, heteroalkynyl, carbocyclyl, heterocyclyl, aryl, and heteroaryl is independently substituted with 0, 1, 2, 3, 4, or 5 R^{gg} groups, or two geminal R^{dd} substituents can be joined to form ═O or ═S; wherein X⁻ is a counterion; each instance of R^{ee} is, independently, selected from C₁₋₆ alkyl, C₁₋₆ perhaloalkyl, C₂₋₆ alkenyl, C₂₋₆ alkynyl, heteroC₁₋₆alkyl, heteroC₂₋₆alkenyl, heteroC₂₋₆alkynyl, C₃₋₁₀ carbocyclyl, C₆₋₁₀ aryl, 3-10 membered heterocyclyl, and 3-10 membered heteroaryl, wherein each alkyl, alkenyl, alkynyl, heteroalkyl, heteroalkenyl, heteroalkynyl, carbocyclyl, heterocyclyl, aryl, and heteroaryl is independently substituted with 0, 1, 2, 3, 4, or 5 R^{gg} groups;
[0163] each instance of R^{ff} is, independently, selected from hydrogen, C₁₋₆ alkyl, C₁₋₆ perhaloalkyl, C₂₋₆ alkenyl, C₂₋₆ alkynyl, heteroC₁₋₆alkyl, heteroC₂₋₆alkenyl, heteroC₂₋₆alkynyl, C₃₋₁₀ carbocyclyl, 3-10 membered heterocyclyl, C₆₋₁₀ aryl and 5-10 membered heteroaryl, or two R^{ff} groups are joined to form a 3-10 membered heterocyclyl or 5-10 membered heteroaryl ring, wherein each alkyl, alkenyl, alkynyl, heteroalkyl, heteroalkenyl, heteroalkynyl, carbocyclyl, heterocyclyl, aryl, and heteroaryl is independently substituted with 0, 1, 2, 3, 4, or 5 R^{gg} groups; and each instance of R^{gg} is, independently, halogen, —CN, —NO₂, —N₃, —SO₂H, —SO₃H, —OH, —OC₁₋₆ alkyl, —ON(C₁₋₆ alkyl)₂, —N(C₁₋₆ alkyl)₂, —N(C₁₋₆ alkyl)₃⁺X⁻, —NH(C₁₋₆ alkyl)₂⁺X⁻, —NH2(C₁₋₆ alkyl)⁺X⁻, —NH3⁺X⁻, —N(OC₁₋₆ alkyl)(C₁₋₆ alkyl), —N(OH)(C₁₋₆ alkyl), —NH(OH), —SH, —SC₁₋₆ alkyl, —SS(C₁₋₆ alkyl), —C(═O)(C₁₋₆ alkyl), —CO₂H, —CO₂(C₁₋₆ alkyl), —OC(═O)(C₁₋₆ alkyl), —CO₂(C₁₋₆ alkyl), —C(═O)NH2, —C(═O)N(C₁₋₆ alkyl)₂, —OC(═O)NH(C₁₋₆ alkyl), —NHC(═O)(C₁₋₆ alkyl), —N(C₁₋₆ alkyl)C(═O)(C₁₋₆ alkyl), —NHCO₂(C₁₋₆ alkyl), —NHC(═O)N(C₁₋₆ alkyl)₂, —NHC(═O)NH(C₁₋₆ alkyl), —NHC(═O)NH₂, —C(═NH)O(C₁₋₆ alkyl), —OC(═NH)(C₁₋₆ alkyl), —OC(═NH)OC₁₋₆ alkyl, —C(═NH)N(C₁₋₆ alkyl)₂, —C(═NH)NH(C₁₋₆ alkyl), —C(═NH)NH₂, —OC(═NH)N(C₁₋₆ alkyl)₂, —OC(NH)NH(C₁₋₆ alkyl), —OC(NH)NH₂, —NHC(NH)N(C₁₋₆ alkyl)₂, —NHC(═NH)NH₂, —NHSO₂(C₁₋₆ alkyl), —SO₂N(C₁₋₆ alkyl)₂, —SO₂NH(C₁₋₆ alkyl), —SO₂NH₂, —SO₂C₁₋₆ alkyl, —SO₂₀C₁₋₆ alkyl, —OSO₂C₁₋₆ alkyl, —SOC₁₋₆ alkyl, —Si(C₁₋₆ alkyl)₃, —OSi(C₁₋₆ alkyl)₃—C(═S)N(C₁₋₆ alkyl)₂, C(═S)NH(C₁₋₆ alkyl), C(═S)NH2, —C(═O)S(C₁₋₆ alkyl), —C(═S)SC₁₋₆ alkyl, —SC(═S)SC₁₋₆ alkyl, —P(═O)(OC₁₋₆ alkyl)₂, —P(═O)(C₁₋₆ alkyl)₂, —OP(═O)(C₁₋₆ alkyl)₂, —OP(═O)(OC₁₋₆ alkyl)₂, C₁₋₆ alkyl, C₁₋₆ perhaloalkyl, C₂₋₆ alkenyl, C₂₋₆ alkynyl, heteroC₁₋₆alkyl, heteroC₂₋₆alkenyl, heteroC₂₋₆alkynyl, C₃₋₁₀ carbocyclyl, C₆₋₁₀ aryl, 3-10 membered heterocyclyl, 5-10 membered heteroaryl; or two geminal R^{gg} substituents can be joined to form ═O or ═S; wherein X⁻ is a counterion.

[0164] A “counterion” or “anionic counterion” is a negatively charged group associated with a positively charged group in order to maintain electronic neutrality. An anionic counterion may be monovalent (i.e., including one formal negative charge). An anionic counterion may also be multivalent (i.e., including more than one formal negative charge), such as divalent or trivalent. Exemplary counterions include halide ions (e.g., F⁻, Cl⁻, B⁻r, I⁻), NO₃⁻, ClO₄⁻, OH⁻, H₂PO₄, HCO₃⁻, HSO₄⁻, sulfonate ions (e.g., methansulfonate, trifluoromethanesulfonate, p-toluenesulfonate, benzenesulfonate, 10-camphor sulfonate, naphthalene-2-sulfonate, naphthalene-1-sulfonic acid-5-sulfonate, ethan-1-sulfonic acid-2-sulfonate, and the like), carboxylate ions (e.g., acetate, propanoate, benzoate, glycerate, lactate, tartrate, glycolate, gluconate, and the like), BF₄⁻, PF₄⁻, PF₆⁻, AsF₆⁻, SbF₆, B[3,5-(CF₃)₂C₆H3]4₁⁻, B(C₆F₅)₄⁻, BPh₄⁻, Al(OC(CF₃)₃)₄⁻, and carborane anions (e.g., CB₁₁H₁₂⁻ or (HCB₁₁Me₅Br6)⁻). Exemplary counterions which may be multivalent include CO₃²⁻, HPO₄²⁻, PO₄³⁻, B₄O₇²⁻, SO₄²⁻, S₂O₃²⁻, carboxylate anions (e.g., tartrate, citrate, fumarate, maleate, malate, malonate, gluconate, succinate, glutarate, adipate, pimelate, suberate, azelate, sebacate, salicylate, phthalates, aspartate, glutamate, and the like), and carboranes.

[0165] The term “pharmaceutically acceptable salt” refers to those salts which are, within the scope of sound medical judgment, suitable for use in contact with the tissues of humans and lower animals without undue toxicity, irritation, allergic response and the like, and are commensurate with a reasonable benefit/risk ratio. Pharmaceutically acceptable salts are well known in the art. For example, Berge et al., describe pharmaceutically acceptable salts in detail in J. Pharmaceutical Sciences, 1977, 66, 1-19, incorporated by reference. Pharmaceutically acceptable salts of the compounds disclosed in this application include those derived from suitable inorganic and organic acids and bases. Examples of pharmaceutically acceptable, nontoxic acid addition salts are salts of an amino group formed with inorganic acids such as hydrochloric acid, hydrobromic acid, phosphoric acid, sulfuric acid, and perchloric acid or with organic acids such as acetic acid, oxalic acid, maleic acid, tartaric acid, citric acid, succinic acid, or malonic acid or by using other methods known in the art such as ion exchange. Other pharmaceutically acceptable salts include adipate, alginate, ascorbate, aspartate, benzenesulfonate, benzoate, bisulfate, borate, butyrate, camphorate, camphorsulfonate, citrate, cyclopentanepropionate, digluconate, dodecylsulfate, ethanesulfonate, formate, fumarate, glucoheptonate, glycerophosphate, gluconate, hemisulfate, heptanoate, hexanoate, hydroiodide, 2-hydroxy-ethanesulfonate, lactobionate, lactate, laurate, lauryl sulfate, malate, maleate, malonate, methanesulfonate, 2-naphthalenesulfonate, nicotinate, nitrate, oleate, oxalate, palmitate, pamoate, pectinate, persulfate, 3-phenylpropionate, phosphate, picrate, pivalate, propionate, stearate, succinate, sulfate, tartrate, thiocyanate, p-toluenesulfonate, undecanoate, valerate salts, and the like. Salts derived from appropriate bases include alkali metal, alkaline earth metal, ammonium and N+(C₁₋₄ alkyl)₄⁻ salts. Representative alkali or alkaline earth metal salts include sodium, lithium, potassium, calcium, magnesium, and the like. Further pharmaceutically acceptable salts include, when appropriate, nontoxic ammonium, quaternary ammonium, and amine cations formed using counterions such as halide, hydroxide, carboxylate, sulfate, phosphate, nitrate, lower alkyl sulfonate, and aryl sulfonate.

[0166] The term “solvate” refers to forms of a compound that are associated with a solvent, usually by a solvolysis reaction. This physical association may include hydrogen bonding. Conventional solvents include water, methanol, ethanol, acetic acid, DMSO, THF, diethyl ether, and the like. The compounds of Formula (1), (9), (10), and (11) may be prepared, e.g., in crystalline form, and may be solvated. Suitable solvates include pharmaceutically acceptable solvates and further include both stoichiometric solvates and non-stoichiometric solvates. In certain instances, the solvate will be capable of isolation, for example, when one or more solvent molecules are incorporated in the crystal lattice of a crystalline solid. “Solvate” encompasses both solution-phase and isolable solvates. Representative solvates include hydrates, ethanolates, and methanolates.

[0167] The term “hydrate” refers to a compound that is associated with water. Typically, the number of the water molecules contained in a hydrate of a compound is in a definite ratio to the number of the compound molecules in the hydrate. Therefore, a hydrate of a compound may be represented, for example, by the general formula R·x H₂O, wherein R is the compound and wherein x is a number greater than 0. A given compound may form more than one type of hydrates, including, e.g., monohydrates (x is 1), lower hydrates (x is a number greater than 0 and smaller than 1, e.g., hemihydrates (R·0.5 H₂O)), and polyhydrates (x is a number greater than 1, e.g., dihydrates (R·2 H₂O) and hexahydrates (R·6 H₂O)).

[0168] The term “tautomers” refer to compounds that are interchangeable forms of a particular compound structure, and that vary in the displacement of hydrogen atoms and electrons. Thus, two structures may be in equilibrium through the movement of π electrons and an atom (usually H). For example, enols and ketones are tautomers because they are rapidly interconverted by treatment with either acid or base. Another example of tautomerism is the aci- and nitro- forms of phenylnitromethane, which are likewise formed by treatment with acid or base. Tautomeric forms may be relevant to the attainment of the optimal chemical reactivity and biological activity of a compound of interest.

[0169] It is also to be understood that compounds that have the same molecular formula but differ in the nature or sequence of bonding of their atoms or the arrangement of their atoms in space are termed “isomers.” Isomers that differ in the arrangement of their atoms in space are termed “stereoisomers.”

[0170] Stereoisomers that are not mirror images of one another are termed “diastereomers” and those that are non-superimposable mirror images of each other are termed “enantiomers.” When a compound has an asymmetric center, for example, it is bonded to four different groups, a pair of enantiomers is possible. An enantiomer can be characterized by the absolute configuration of its asymmetric center and described by the R- and S-sequencing rules of Cahn and Prelog. An enantiomer can also be characterized by the manner in which the molecule rotates the plane of polarized light, and designated as dextrorotatory or levorotatory (i.e., as (+) or (−)-isomers respectively). A chiral compound can exist as either an individual enantiomer or as a mixture of enantiomers. A mixture containing equal proportions of the enantiomers is called a “racemic mixture.”

[0171] The term “co-crystal” refers to a crystalline structure comprising at least two different components (e.g., a compound described in this application and an acid), wherein each of the components is independently an atom, ion, or molecule. In certain embodiments, none of the components is a solvent. In certain embodiments, at least one of the components is a solvent. A co-crystal of a compound and an acid is different from a salt formed from a compound and the acid. In the salt, a compound described in this application is complexed with the acid in a way that proton transfer (e.g., a complete proton transfer) from the acid to a compound described in this application easily occurs at room temperature. In the co-crystal, however, a compound described in this application is complexed with the acid in a way that proton transfer from the acid to a compound described in this application does not easily occur at room temperature. In certain embodiments, in the co-crystal, there is no proton transfer from the acid to a compound described in this application. In certain embodiments, in the co-crystal, there is partial proton transfer from the acid to a compound described in this application. Co-crystals may be useful to improve the properties (e.g., solubility, stability, and ease of formulation) of a compound described in this application.

[0172] The term “polymorphs” refers to a crystalline form of a compound (or a salt, hydrate, or solvate thereof) in a particular crystal packing arrangement. All polymorphs of the same compound have the same elemental composition. Different crystalline forms usually have different X-ray diffraction patterns, infrared spectra, melting points, density, hardness, crystal shape, optical and electrical properties, stability, and solubility. Recrystallization solvent, rate of crystallization, storage temperature, and other factors may cause one crystal form to dominate. Various polymorphs of a compound can be prepared by crystallization under different conditions.

[0173] The term “prodrug” refers to compounds, including derivatives of the compounds of Formula (X), (8), (9), (10), or (11), that have cleavable groups and become by solvolysis or under physiological conditions the compounds of Formula (X), (8), (9), (10), or (11) and that are pharmaceutically active in vivo. The prodrugs may have attributes such as, without limitation, solubility, bioavailability, tissue compatibility, or delayed release in a mammalian organism. Examples include, but are not limited to, derivatives of compounds described in this application, including derivatives formed from glycosylation of the compounds described in this application (e.g., glycoside derivatives), carrier-linked prodrugs (e.g., ester derivatives), bioprecursor prodrugs (a prodrug metabolized by molecular modification into the active compound), and the like. Non-limiting examples of glycoside derivatives are disclosed in and incorporated by reference from PCT Publication No. WO2018/208875 and U.S. Patent Publication No. 2019/0078168. Non-limiting examples of ester derivatives are disclosed in and incorporated by reference from U.S. Patent Publication No. 2017/0362195.

[0174] Other derivatives of the compounds of this invention have activity in both their acid and acid derivative forms, but the acid sensitive form often offers advantages of solubility, bioavailability, tissue compatibility, or delayed release in a mammalian organism (see, Bundgard, H., Design of Prodrugs, pp. 7-9, 21-24, Elsevier, Amsterdam 1985). Prodrugs include acid derivatives well known to practitioners of the art, such as, for example, esters prepared by reaction of the parent acid with a suitable alcohol, or amides prepared by reaction of the parent acid compound with a substituted or unsubstituted amine, or acid anhydrides, or mixed anhydrides. Simple aliphatic or aromatic esters, amides, and anhydrides derived from acidic groups pendant on the compounds of this invention are particular prodrugs. In some cases it is desirable to prepare double ester type prodrugs such as (acyloxy)alkyl esters or ((alkoxycarbonyl)oxy)alkylesters. C₁-C₈ alkyl, C₂-C₈ alkenyl, C₂-C₈ alkynyl, aryl, C₇-C₁₂ substituted aryl, and C₇-C₁₂ arylalkyl esters of the compounds of Formula (X), (8), (9), (10), or (11) may be preferred.

### Cannabinoids

[0175] As used in this application, the term “cannabinoid” includes compounds of Formula (X):

[chemical structure]

or a pharmaceutically acceptable salt, co-crystal, tautomer, stereoisomer, solvate, hydrate, polymorph, isotopically enriched derivative, or prodrug thereof, wherein R1 is hydrogen, optionally substituted acyl, optionally substituted alkyl, optionally substituted alkenyl, optionally substituted alkynyl, optionally substituted carbocyclyl, or optionally substituted aryl; R2 and R6 are, independently, hydrogen or carboxyl; R3 and R5 are, independently, hydroxyl, halogen, or alkoxy; and R4 is a hydrogen or an optionally substituted prenyl moiety; or optionally R4 and R3 are taken together with their intervening atoms to form a cyclic moiety, or optionally R4 and R5 are taken together with their intervening atoms to form a cyclic moiety, or optionally both 1) R4 and R3 are taken together with their intervening atoms to form a cyclic moiety and 2) R4 and R5 are taken together with their intervening atoms to form a cyclic moiety. In certain embodiments, R4 and R3 are taken together with their intervening atoms to form a cyclic moiety. In certain embodiments, R4 and R5 are taken together with their intervening atoms to form a cyclic moiety. In certain embodiments, “cannabinoid” refers to a compound of Formula (X), or a pharmaceutically acceptable salt thereof. In certain embodiments, both 1) R4 and R3 are taken together with their intervening atoms to form a cyclic moiety and 2) R4 and R5 are taken together with their intervening atoms to form a cyclic moiety.

[0176] In some embodiments, cannabinoids may be synthesized via the following steps: a) one or more reactions to incorporate three additional ketone moieties onto an acyl-CoA scaffold, where the acyl moiety in the acyl-CoA scaffold comprises between four and fourteen carbons; b) a reaction cyclizing the product of step (a); and c) a reaction to incorporate a prenyl moiety to the product of step (b) or a derivative of the product of step (b). In some embodiments, non-limiting examples of the acyl-CoA scaffold described in step (a) include hexanoyl-CoA and butyryl-CoA. In some embodiments, non-limiting examples of the product of step (b) or a derivative of the product of step (b) include olivetolic acid, divarinic acid, and sphaerophorolic acid.

[0177] In some embodiments, a cannabinoid compound of Formula (X) is of Formula (X-A), (X-B), or (X-C):

[chemical structure]

[0178] or a pharmaceutically acceptable salt, solvate, hydrate, polymorph, co-crystal, tautomer, stereoisomer, isotopically labeled derivative, or prodrug thereof;
[0179] wherein [symbol] is a double bond or a single bond, as valency permits;
   [0180] R is hydrogen, optionally substituted acyl, optionally substituted alkyl, optionally substituted alkenyl, optionally substituted alkynyl, optionally substituted carbocyclyl, or optionally substituted aryl;
   [0181] R^{Z1} is hydrogen, optionally substituted acyl, optionally substituted alkyl, optionally substituted alkenyl, optionally substituted alkynyl, optionally substituted carbocyclyl, or optionally substituted aryl;
   [0182] R^{Z2} is hydrogen, optionally substituted acyl, optionally substituted alkyl, optionally substituted alkenyl, optionally substituted alkynyl, optionally substituted carbocyclyl, or optionally substituted aryl;
   [0183] or optionally, R^{Z1} and R²² are taken together with their intervening atoms to form an optionally substituted carbocyclic ring;
   [0184] R^{3A} is hydrogen, optionally substituted acyl, optionally substituted alkyl, optionally substituted alkenyl, or optionally substituted alkynyl;
   [0185] R^{3B} is hydrogen, optionally substituted acyl, optionally substituted alkyl, optionally substituted alkenyl, or optionally substituted alkynyl;
   [0186] R^{Y} is hydrogen, optionally substituted acyl, optionally substituted alkyl, optionally substituted alkenyl, or optionally substituted alkynyl;
   [0187] R^{Z} is hydrogen, optionally substituted acyl, optionally substituted alkyl, optionally substituted alkenyl, or optionally substituted alkynyl.

[0188] In certain embodiments, a cannabinoid compound is of Formula (X-A):

[chemical structure]

wherein [symbol] is a double bond, and each of R^{Z1} and R^{Z2} is hydrogen, one of R^{3A} and R^{3B} is optionally substituted C₂₋₆ alkenyl, and the other one of R^{3A} and R^{3B} is optionally substituted C₂₋₆ alkyl. In some embodiments, a cannabinoid compound of Formula (X) is of Formula (X-A), wherein each of R^{Z1} and R^{Z2} is hydrogen, one of R^{3A} and R^{3B} is a prenyl group, and the other one of R^{3A} and R^{3B} is optionally substituted methyl.

[0189] In certain embodiments, a cannabinoid compound of Formula (X) of Formula (X-A) is of Formula (11-z):

[chemical structure]

wherein [symbol] is a double bond or single bond, as valency permits; one of R^{3A} and R^{3B} is C₁₋₆ alkyl optionally substituted with alkenyl, and the other of R^{3A} and R^{3B} is optionally substituted C₁₋₆ alkyl. In certain embodiments, in a compound of Formula (11-z), [symbol] is a single bond; one of R^{3A} and R^{3B} is C₁₋₆ alkyl optionally substituted with prenyl; and the other of one of R^{3A} and R^{3B} is unsubstituted methyl; and R is as described in this application. In certain embodiments, in a compound of Formula (11-z), [symbol] is a singe bond; one of R^{3A} and R^{3B} is

[chemical structure]

and the other of one of R^{3A} and R^{3B} is unsubstituted methyl; and R is as described in this application. In certain embodiments, a cannabinoid compound of Formula (11-z) is of Formula (11a):

[chemical structure]

[0190] In certain embodiments, a cannabinoid compound of Formula (X) of Formula (X-A) is of Formula (11a):

[chemical structure]

[0191] In certain embodiments a cannabinoid compound of Formula (X-A) is of Formula (10-z):

[chemical structure]

wherein [symbol] is a double bond or single bond, as valency permits; R^{Y} is hydrogen, optionally substituted acyl, optionally substituted alkyl, optionally substituted alkenyl, or optionally substituted alkynyl; and each of R^{3A} and R^{3B} is independently optionally substituted C₁₋₆ alkyl. In certain embodiments, in a compound of Formula (10-z), [symbol] is a single bond; each of R^{3A} and R^{3B} is unsubstituted methyl, and R is as described in this application. In certain embodiments, a cannabinoid compound of Formula (10-z) is of Formula (10a):

[chemical structure]

In certain embodiments, a compound of Formula (10a)

[chemical structure]

has a chiral atom labeled with * at carbon 10 and a chiral atom labeled with ** at carbon 6. In certain embodiments, in a compound of Formula (10a)

[chemical structure]

the chiral atom labeled with * at carbon 10 is of the R-configuration or S-configuration; and a chiral atom labeled with ** at carbon 6 is of the R-configuration. In certain embodiments, in a compound of Formula (10a)

[chemical structure]

the chiral atom labeled with * at carbon 10 is of the S-configuration; and a chiral atom labeled with ** at carbon 6 is of the R-configuration or S-configuration. In certain embodiments, in a compound of Formula (10a)

[chemical structure]

the chiral atom labeled with * at carbon 10 is of the R-configuration and a chiral atom labeled with ** at carbon 6 is of the R-configuration. In certain embodiments, a compound of Formula (10a)

[chemical structure]

is of the formula:

[chemical structure]

In certain embodiments, in a compound of Formula (10a)

[chemical structure]

the chiral atom labeled with * at carbon 10 is of the S-configuration and a chiral atom labeled with ** at carbon 6 is of the S-configuration. In certain embodiments, a compound of Formula (10a)

[chemical structure]

is of the formula:

[chemical structure]

[0192] In certain embodiments, a cannabinoid compound is of Formula (X-B):

[chemical structure]

wherein [symbol] is a double bond; R^{Y} is hydrogen, optionally substituted acyl, optionally substituted alkyl, optionally substituted alkenyl, or optionally substituted alkynyl; and each of R^{3A} and R^{3B} is independently optionally substituted C₁₋₆ alkyl. In certain embodiments, in a compound of Formula (X-B), R^{Y} is optionally substituted C₁₋₆ alkyl; one of R^{3A} and R^{3B} is

[chemical structure]

and the other one of R^{3A} and R^{3B} is unsubstituted methyl, and R is as described in this application. In certain embodiments, a compound of Formula (X-B) is of Formula (9a):

[chemical structure]

In certain embodiments, a compound of Formula (9a)

[chemical structure]

has a chiral atom labeled with * at carbon 3 and a chiral atom labeled with ** at carbon 4. In certain embodiments, in a compound of Formula (9a)

[chemical structure]

the chiral atom labeled with * at carbon 3 is of the R-configuration or S-configuration; and a chiral atom labeled with ** at carbon 4 is of the R-configuration. In certain embodiments, in a compound of Formula (9a)

[chemical structure]

the chiral atom labeled with * at carbon 3 is of the S-configuration; and a chiral atom labeled with ** at carbon 4 is of the R-configuration or S-configuration. In certain embodiments, in a compound of Formula (9a)

[chemical structure]

the chiral atom labeled with * at carbon 3 is of the R-configuration and a chiral atom labeled with ** at carbon 4 is of the R-configuration. In certain embodiments, a compound of Formula (9a)

[chemical structure]

is of the formula:

[chemical structure]

In certain embodiments, in a compound of Formula (9a)

[chemical structure]

the chiral atom labeled with * at carbon 3 is of the S-configuration and a chiral atom labeled with ** at carbon 4 is of the S-configuration. In certain embodiments, a compound of Formula (9a)

[chemical structure]

is of the formula:

[chemical structure]

[0193] In certain embodiments, a cannabinoid compound is of Formula (X-C):

[chemical structure]

wherein R^{Z} is optionally substituted alkyl or optionally substituted alkenyl. In certain embodiments, a compound of Formula (X-C) is of formula:

[chemical structure]

wherein a is 1, 2, 3, 4, 5, 6, 7, 8, 9, or 10. In certain embodiments, a is 1. In certain embodiments, a is 2. In certain embodiments, a is 3. In certain embodiments, a is 1, 2, or 3 for a compound of Formula (X-C). In certain embodiments, a cannabinoid compound is of Formula (X-C), and a is 1, 2, 3, 4, or 5. In certain embodiments, a compound of Formula (X-C) is of Formula (8a):

[chemical structure]

[0194] In some embodiments, cannabinoids of the present disclosure comprise cannabinoid receptor ligands. Cannabinoid receptors are a class of cell membrane receptors in the G protein-coupled receptor superfamily. Cannabinoid receptors include the CB₁ receptor and the CB₂ receptor. In some embodiments, cannabinoid receptors comprise GPR18, GPR55, and PPAR. (See Bram et al. “Activation of GPR18 by cannabinoid compounds: a tale of biased agonism” Br J Pharmcol v171 (16) (2014); Shi et al. “The novel cannabinoid receptor GPR55 mediates anxiolytic-like effects in the medial orbital cortex of mice with acute stress” Molecular Brain 10, No. 38 (2017); and O'Sullvan, Elizabeth. “An update on PPAR activation by cannabinoids” Br J Pharmcol v. 173(12) (2016)).

[0195] In some embodiments, cannabinoids comprise endocannabinoids, which are substances produced within the body, and phytocannabinoids, which are cannabinoids that are naturally produced by plants of genus Cannabis. In some embodiments, phytocannabinoids comprise the acidic and decarboxylated acid forms of the naturally-occurring plant-derived cannabinoids, and their synthetic and biosynthetic equivalents.

[0196] Over 94 phytocannabinoids have been identified to date (Berman, Paula, et al. “A new ESI-LC/MS approach for comprehensive metabolic profiling of phytocannabinoids in Cannabis.” Scientific reports 8.1 (2018): 14280; El-Alfy et al., 2010, “Antidepressant-like effect of delta-9-tetrahydrocannabinol and other cannabinoids isolated from Cannabis sativa L”, Pharmacology Biochemistry and Behavior 95 (4): 434-42; Rudolf Brenneisen, 2007, Chemistry and Analysis of Phytocannabinoids, Citti, Cinzia, et al. “A novel phytocannabinoid isolated from Cannabis sativa L. with an in vivo cannabimimetic activity higher than A9-tetrahydrocannabinol: Δ9-Tetrahydrocannabiphorol.” Sci Rep 9 (2019): 20335, each of which is incorporated by reference in this application in its entirety). In some embodiments, cannabinoids comprise Δ⁹-tetrahydrocannabinol (THC) type (e.g., (−)-trans-delta-9-tetrahydrocannabinol or dronabinol, (+)-trans-delta-9-tetrahydrocannabinol, (−)-cis-delta-9-tetrahydrocannabinol, or (+)-cis-delta-9-tetrahydrocannabinol), cannabidiol (CBD) type, cannabigerol (CBG) type, cannabichromene (CBC) type, cannabicyclol (CBL) type, cannabinodiol (CBND) type, or cannabitriol (CBT) type cannabinoids, or any combination thereof (see, e.g., R Pertwee, ed, Handbook of Cannabis (Oxford, UK: Oxford University Press, 2014)), which is incorporated by reference in this application in its entirety). A non-limiting list of cannabinoids comprises: cannabiorcol-C1 (CBNO), CBND-C1 (CBNDO), Δ⁹-trans-Tetrahydrocannabiorcolic acid-C1 (Δ⁹-THCO), Cannabidiorcol-C1 (CBDO), Cannabiorchromene-C1 (CBCO), (−)-Δ⁸-trans-(6aR,10aR)-Tetrahydrocannabiorcol-C1 (Δ⁸-THCO), Cannabiorcyclol C1 (CBLO), CBG-C1 (CBGO), Cannabinol-C₂ (CBN-C2), CBND-C2, Δ⁹-THC-C2, CBD-C2, CBC-C2, Δ⁸-THC-C2, CBL-C2, Bisnor-cannabielsoin-C1 (CBEO), CBG-C2, Cannabivarin-C3 (CBNV), Cannabinodivarin-C3 (CBNDV), (−)-Δ⁹-trans-Tetrahydrocannabivarin-C3 (Δ⁹-THCV), (−)-Cannabidivarin-C3 (CBDV), (±)-Cannabichromevarin-C3 (CBCV), (−)-Δ⁸-trans-THC-C3 (Δ⁸-THCV), (±)-(1aS,3aR,8bR,8cR)-Cannabicyclovarin-C3 (CBLV), 2-Methyl-2-(4-methyl-2-pentenyl)-7-propyl-2H-1-benzopyran-5-ol, Δ⁷-tetrahydrocannabivarin-C3 (Δ⁷-THCV), CBE-C2, Cannabigerovarin-C3 (CBGV), Cannabitriol-C1 (CBTO), Cannabinol-C4 (CBN-C4), CBND-C4, (−)-Δ⁹-trans-Tetrahydrocannabinol-C4 (Δ⁹-THC-C4), Cannabidiol-C4 (CBD-C4), CBC-C4, (−)-trans-Δ⁸-THC-C4, CBL-C4, Cannabielsoin-C3 (CBEV), CBG-C4, CBT-C2, Cannabichromanone-C3, Cannabiglendol-C3 (OH-iso-HHCV-C3), Cannabioxepane-C5 (CBX), Dehydrocannabifuran-C5 (DCBF), Cannabinol-C5 (CBN), Cannabinodiol-C5 (CBND), (−)-Δ⁹-trans-Tetrahydrocannabinol-C5 (Δ⁹-THC), (−)-Δ⁸-trans-(6aR, 10aR)-Tetrahydrocannabinol-C5 (Δ⁹-THC), (±)-Cannabichromene-C5 (CBC), (−)-Cannabidiol-C5 (CBD), (±)-(1aS,3aR,8bR,8cR)-CannabicyclolC5 (CBL), Cannabicitran-C5 (CBR), (−)-Δ⁹-(6aS, 10aR-cis)-Tetrahydrocannabinol-C5 ((−)-cis-Δ⁹-THC), (−)-Δ⁷-trans-(1R,3R,6R)-Isotetrahydrocannabinol-C5 (trans-isoA⁷-THC), CBE-C4, Cannabigerol-C5 (CBG), Cannabitriol-C3 (CBTV), Cannabinol methyl ether-C5 (CBNM), CBNDM-C5, 8-OH—CBN-C5 (OH—CBN), OH—CBND-C5 (OH—CBND), 10-Oxo-A^{6a(10a)}-Tetrahydrocannabinol-C5 (OTHC), Cannabichromanone D-C5, Cannabicoumaronone-C5 (CBCON-C5), Cannabidiol monomethyl ether-C5 (CBDM), Δ⁹-THCM-C5, (±)-3″-hydroxy-Δ⁴″-cannabichromene-C5, (5aS,6S,9R,9aR)-Cannabielsoin-C5 (CBE), 2-geranyl-5-hydroxy-3-n-pentyl-1,4-benzoquinone-C5, 5-geranyl olivetolic acid, 5-geranyl olivetolate, 8α-Hydroxy-Δ⁹-Tetrahydrocannabinol-C5 (8α-OH-Δ⁹-THC), 8β-Hydroxy-Δ⁹-Tetrahydrocannabinol-C5 (80-OH-Δ⁹-THC), 10α-Hydroxy-Δ⁸-Tetrahydrocannabinol-C5 (10α-OH-Δ⁸-THC), 100-Hydroxy-Δ⁸-Tetrahydrocannabinol-C5 (100-OH-Δ⁸-THC), 10α-hydroxy-Δ^{9,11}-hexahydrocannabinol-C5, 9β, 10β-Epoxyhexahydrocannabinol-C5, OH—CBD-C5 (OH—CBD), Cannabigerol monomethyl ether-C5 (CBGM), Cannabichromanone-C5, CBT-C4, (±)-6,7-cis-epoxycannabigerol-C5, (±)-6,7-trans-epoxycannabigerol-C5, (−)-7-hydroxycannabichromane-C5, Cannabimovone-C5, (−)-trans-Cannabitriol-C5 ((−)-trans-CBT), (+)-trans-Cannabitriol-C5 ((+)-trans-CBT), (±)-cis-Cannabitriol-C5 ((±)-cis-CBT), (−)-trans-10-Ethoxy-9-hydroxy-Δ^{6a(10a)}-tetrahydrocannabivarin-C3 [(−)-trans-CBT-OEt], (−)-(6aR,9S,10S,10aR)-9,10-Dihydroxyhexahydrocannabinol-C5 [(−)-Cannabiripsol] (CBR), Cannabichromanone C-C5, (−)-6a,7,10a-Trihydroxy-Δ⁹-tetrahydrocannabinol-C5 [(−)-Cannabitetrol] (CBTT), Cannabichromanone B-C5, 8,9-Dihydroxy-Δ^{6a(10a)}-tetrahydrocannabinol-C5 (8,9-Di-OHCBT), (±)-4-acetoxycannabichromene-C5, 2-acetoxy-6-geranyl-3-n-pentyl-1,4-benzoquinone-C5, 11-Acetoxy-Δ⁹-TetrahydrocannabinolC5 (11-OAc-Δ9-THC), 5-acetyl-4-hydroxycannabigerol-C5, 4-acetoxy-2-geranyl-5-hydroxy-3-npentylphenol-C5, (−)-trans-10-Ethoxy-9-hydroxy-Δ^{6a(10a)}-tetrahydrocannabinol-C5 ((−)-trans-CBTOEt), sesquicannabigerol-C5 (SesquiCBG), carmagerol-C₅, 4-terpenyl cannabinolate-C5, 0-fenchyl-Δ⁹-tetrahydrocannabinolate-C5, α-fenchyl-Δ⁹-tetrahydrocannabinolate-C5, epi-bornyl-Δ⁹-tetrahydrocannabinolate-C5, bornyl-Δ⁹-tetrahydrocannabinolate-C5, α-terpenyl-Δ⁹-tetrahydrocannabinolate-C5, 4-terpenyl-Δ⁹-tetrahydrocannabinolate-C5, 6,6,9-trimethyl-3-pentyl-6H-dibenzo[b,d]pyran-1-ol, 3-(1,1-dimethylheptyl)-6,6a,7, 8, 10,10a-hexahydro-1-hydroxy-6,6-dimethyl-9H-dibenzo[b,d]pyran-9-one, (−)-(3S,4S)-7-hydroxy-A⁶-tetrahydrocannabinol-1,1-dimethylheptyl, (+)-(3S,4S)-7-hydroxy-A⁶-tetrahydrocannabinol-1,1-dimethylheptyl, 11-hydroxy-Δ⁹-tetrahydrocannabinol, and Δ⁸-tetrahydrocannabinol-11-oic acid)); certain piperidine analogs (e.g., (−)-(6S,6aR,9R,10aR)-5,6,6a,7,8,9,10,10a-octahydro-6-methyl-3-[(R)-1-methyl-4-phenylbutoxy]-1,9-phenanthridinediol 1-acetate)), certain aminoalkylindole analogs (e.g., (R)-(+)-[2,3-dihydro-5-methyl-3-(4-morpholinylmethyl)-pyrrolo[1,2,3-de]-1,4-benzoxazin-6-yl]-1-naphthalenyl-methanone), certain open pyran ring analogs (e.g., 2-[3-methyl-6-(1-methylethenyl)-2-cyclohexen-1-yl]-5-pentyl-1,3-benzenediol and 4-(1,1-dimethylheptyl)-2,3′-dihydroxy-6′alpha-(3-hydroxypropyl)-1′,2′, 3′,4′,5′,6′-hexahydrobiphenyl, tetrahydrocannabiphorol (THCP), cannabidiphorol (CBDP), CBGP, CBCP, their acidic forms, salts of the acidic forms, dimers of any combination of the above, trimers of any combination of the above, polymers of any combination of the above, or any combination thereof.

[0197] A cannabinoid described in this application can be a rare cannabinoid. For example, in some embodiments, a cannabinoid described in this application corresponds to a cannabinoid that is naturally produced in conventional Cannabis varieties at concentrations of less than 10%, 9%, 8%, 7%, 6%, 5%, 4%, 3%, 2%,1%, 0.9%, 0.8%, 0.7%, 0.6%, 0.5%, 0.25%, or 0.1% by dry weight of the female flower. In some embodiments, rare cannabinoids include CBGA, CBGVA, THCVA, CBDVA, CBCVA, and CBCA. In some embodiments, rare cannabinoids are cannabinoids that are not THCA, THC, CBDA or CBD.

[0198] A cannabinoid described in this application can also be a non-rare cannabinoid.

[0199] In some embodiments, the cannabinoid is selected from the cannabinoids listed in Table 1.

TABLE 1
Non-limiting examples of cannabinoids according to the present disclosure

[chemical structure]

Δ⁹-Tetrahydro-
cannabinol
Δ⁹-THC-C₅

[chemical structure]

Δ⁹-Tetrahydro-
cannabinol-C₄
Δ⁹-THC-C₄

[chemical structure]

Δ⁹-Tetrahydro-
cannabivarin
Δ⁹-THCV-C₃

[chemical structure]

Δ⁹-Tetrahydro-
cannabiorcol
Δ⁹-THCO-C₁

[chemical structure]

(−)-(6aS,10aR)-Δ⁹-
Tetrahydro-
cannabinol
(−)-cis-Δ⁹-THC-C₅

[chemical structure]

Δ⁹-Tetrahydro-
cannabinolic acid A
Δ⁹-THCA-C₅ A

[chemical structure]

Δ⁹-Tetrahydro-
cannabinolic acid B
Δ⁹-THCA-C₅ B

[chemical structure]

Δ⁹-Tetrahydro-
cannabinolic acid-C₄
A and/or B
Δ⁹-THCA-C₄
A and/or B

[chemical structure]

Δ⁹-Tetrahydro-
cannabivarinic acid A
Δ⁹-THCVA-C₃ A

[chemical structure]

Δ⁹-Tetrahydro-
cannabiorcolic acid
A and/or B
Δ⁹-THCOA-C₁
A and/or B

[chemical structure]

(−)-Δ⁸-trans-
(6aR,10aR)-
Δ⁸-Tetrahydro-
cannabinol
Δ⁸-THC-C₅

[chemical structure]

(−)-Δ⁸-trans-
(6aR,10aR)-
Tetrahydro-
cannabinolic
acid A
Δ⁸-THCA-C₅ A

[chemical structure]

(−)-Cannabidiol
CBD-C5

[chemical structure]

Cannabidiol
momomethyl ether
CBDM-C5

[chemical structure]

Cannabidiol-C4
CBD-C4

[chemical structure]

Cannabidiolic acid
CBDA-C5

[chemical structure]

Cannabidivarinic acid
CBDVA-C3

[chemical structure]

(−)-Cannabidivarin
CBDV-C3

[chemical structure]

Cannabidiorcol
CBD-C1

[chemical structure]

Cannabigerolic acid
A
(E)-CBGA-C₅ A

[chemical structure]

Cannabigerol
(E)-CBG-C₅

[chemical structure]

Cannabigerol
monomethyl ether
(E)-CBGM-C₅ A

[chemical structure]

Cannabinerolic acid
A
(Z)-CBGA-C₅ A

[chemical structure]

Cannabigerovarin
(E)-CBGV-C₃

[chemical structure]

Cannabigerol
(E)-CBG-C₅

[chemical structure]

Cannabigerolic acid A
(E)-CBGA-C₅ A

[chemical structure]

Cannabigerolic acid A
monomethyl ether
(E)-CBGAM-C₅ A

[chemical structure]

Cannabigerovarinic
acid A
(E)-CBGVA-C₃ A

[chemical structure]

Cannabinolic acid A
CBNA-C5 A

[chemical structure]

Cannabinol methyl
ether
CBNM-C5

[chemical structure]

Cannabinol
CBN-C5

[chemical structure]

Cannabinol-C4
CBN-C4

[chemical structure]

Cannabivarin
CBN-C3

[chemical structure]

Cannabinol-C2
CBN-C2

[chemical structure]

Cannabiorcol
CBN-C1

[chemical structure]

(±)-Cannabichromene
CBC-C₅

[chemical structure]

(±)-Cannabichromenic
acid A
CBCA-C₅ A

[chemical structure]

(±)-Cannabivarichro-
mene,
(±)-
Cannabichromevarin
CBCV-C₃

[chemical structure]

(±)-Cannabichro-
mevarinic
acid A
CBCVA-C₃ A

[chemical structure]

(±)-
Cannabichromene
CBC-C₅

[chemical structure]

(±)-
(1aS,3aR,8bR,8cR)-
Cannabicyclol
CBL-C₅

[chemical structure]

(±)-(1aS,3aR,8bR,8cR)-
Cannabicyclolic acid A
CBLA-C₅ A

[chemical structure]

(±)-
(1aS,3aR,8bR,8cR)-
Cannabicyclovarin
CBLV-C₃

[chemical structure]

(−)-(9R,10R)-trans-
10-O-Ethyl-
cannabitriol
(−)-trans-CBT-OEt-C5

[chemical structure]

(±)-(9R,10R/9S,10S)-
Cannabitriol-C3
(±)-trans-CBT-C3

[chemical structure]

(−)-(9R,10R)-trans-
Cannabitriol
(−)-trans-CBT-C5

[chemical structure]

(+)-(9S,10S)-
Cannabitriol
(+)-trans-CBT-C5

[chemical structure]

(±)-(9R,10S/9S,10R)-
Cannabitriol
(±)-cis-CBT-C5

[chemical structure]

(−)-6a,7,10a-
Trihydroxy-
Δ9-tetrahydro-
cannabinol
(−)-Cannabitetrol

[chemical structure]

10-Oxo-Δ6a(10a)-
tetrahydro-
cannabinol
OTHC

[chemical structure]

8,9-Dihydroxy-
Δ6a(10a)-
tetrahydro-
cannabinol
8,9-Di-OH-CBT-C5

[chemical structure]

Cannabidiolic acid A
cannabitriol ester
CBDA-C5 9-OH-CBT-C5
ester

[chemical structure]

(−)-
(6aR,9S,10S,10aR)-
9,10-Dihydroxy-
hexahydro-
cannabinol,
Cannabiripsol
Cannabiripsol-C5

[chemical structure]

(5aS,6S,9R,9aR)-
Cannabielsoic acid B
CBEA-C5 B

[chemical structure]

(5aS,6S,9R,9aR)-
C3-Cannabielsoic
acid B
CBEA-C3 B

[chemical structure]

(5aS,6S,9R,9aR)-
Cannabielsoin
CBE-C5

[chemical structure]

(5aS,6S,9R,9aR)-
C3-Cannabielsoin
CBE-C3

[chemical structure]

(5aS,6S,9R,9aR)-
Cannabielsoic acid A
CBEA-C5 A

[chemical structure]

Cannabiglendol-C3
OH-iso-HHCV-C3

[chemical structure]

Dehydro-
cannabifuran
DCBF-C5

[chemical structure]

Cannabifuran
CBF-C5

[chemical structure]

Cannabidiphorol
(CBDP)

[chemical structure]

Tetrahydro-
cannabiphorol
(THCP)

[chemical structure]

[0200] “Cannabinoids are often classified by “type,” i.e., by the topological arrangement of their prenyl moieties (See, for example, M. A. Elsohly and D. Slade, Life Sci., 2005, 78, 539-548; and L. O. Hanus et al. Nat. Prod. Rep., 2016, 33, 1357). Generally, each “type” of cannabinoid includes the variations possible for ring substitutions of the resorcinol moiety at the position meta to the two hydroxyl moieties. As used herein, a “CBG-type” cannabinoid is a 3-[(2E)-3,7-dimethylocta-2,6-dienyl]-2,4-dihydroxybenzoic acid optionally substituted at the 6 position of the benzoic acid moiety. As used herein, “CBC-type” cannabinoids refer to 5-hydroxy-2-methyl-2-(4-methylpent-3-enyl)-chromene-6-carboxylic acid optionally substituted at the 7 position of the chromene moiety. As used herein, a “THC-type”cannabinoid is a (6aR,10aR)-1-hydroxy-6,6,9-trimethyl-6a,7,8,10a-tetrahydrobenzo[c]chromene-2-carboxylic acid optionally substituted at the 3 position of the benzo[c]chromene moiety. As used herein, a “CBD-type” cannabinoid is a 2,4-dihydroxy-3-[(1R,6R)-3-methyl-6-prop-1-en-2-ylcyclohex-2-en-1-yl]-benzoic acid optionally substituted at the 6 position of the benzoic acid moiety. In some embodiments, the optional ring substitution for each “type” is an optionally substituted C1-C11 alkyl, an optionally substituted C1-C11 alkenyl, an optionally substituted C1-C11 alkynyl, or an optionally substituted C1-C11 aralkyl.

### Biosynthesis of Cannabinoids and Cannabinoid Precursors

[0201] Aspects of the present disclosure provide tools, sequences, and methods for the biosynthetic production of cannabinoids in host cells. In some embodiments, the present disclosure teaches expression of enzymes that are capable of producing cannabinoids by biosynthesis.

[0202] As a non-limiting example, one or more of the enzymes depicted in FIG. 2 may be used to produce a cannabinoid or cannabinoid precursor of interest. FIG. 1 shows a cannabinoid biosynthesis pathway for the most abundant phytocannabinoids found in Cannabis. See also, de Meijer et al. I, II, III, and IV (I: 2003, Genetics, 163:335-346; II: 2005, Euphytica, 145:189-198; III: 2009, Euphytica, 165:293-311; and IV: 2009, Euphytica, 168:95-112), and Carvalho et al. “Designing Microorganisms for Heterologous Biosynthesis of Cannabinoids” (2017) FEMS Yeast Research Jun. 1;17(4), each of which is incorporated by reference in this application in its entirety for all purposes.

[0203] It should be appreciated that a precursor substrate for use in cannabinoid biosynthesis is generally selected based on the cannabinoid of interest. Non-limiting examples of cannabinoid precursors include compounds of Formulae (1)-(8) in FIG. 2. In some embodiments, polyketides, including compounds of Formula (5), could be prenylated. In certain embodiments, the precursor is a precursor compound shown in FIGS. 1, 2, or 3. Substrates in which R contains 1-40 carbon atoms are preferred. In some embodiments, substrates in which R contains 3-8 carbon atoms are most preferred.

[0204] As used in this application, a cannabinoid or a cannabinoid precursor may comprise an R group. See, e.g., FIG. 2. In some embodiments, R may be a hydrogen. In certain embodiments, R is optionally substituted alkyl. In certain embodiments, R is optionally substituted C1-40 alkyl. In certain embodiments, R is optionally substituted C2-40 alkyl. In certain embodiments, R is optionally substituted C2-40 alkyl, which is straight chain or branched alkyl. In certain embodiments, R is optionally substituted C3-8 alkyl. In certain embodiments, R is optionally substituted C₁-C₄₀ alkyl, C1-C20 alkyl, C1-C10 alkyl, C1-C8 alkyl, C1-C5 alkyl, C3-C5 alkyl, C3 alkyl, or C5 alkyl. In certain embodiments, R is optionally substituted C1-C20 alkyl. In certain embodiments, R is optionally substituted C1-C10 alkyl. In certain embodiments, R is optionally substituted C1-C8 alkyl. In certain embodiments, R is optionally substituted C1-C5 alkyl. In certain embodiments, R is optionally substituted C1-C7 alkyl. In certain embodiments, R is optionally substituted C3-C5 alkyl. In certain embodiments, R is optionally substituted C3 alkyl. In certain embodiments, R is unsubstituted C3 alkyl. In certain embodiments, R is n-C3 alkyl. In certain embodiments, R is n-propyl. In certain embodiments, R is n-butyl. In certain embodiments, R is n-pentyl. In certain embodiments, R is n-hexyl. In certain embodiments, R is n-heptyl. In certain embodiments, R is of formula:

[chemical structure]

In certain embodiments, R is optionally substituted C4 alkyl. In certain embodiments, R is unsubstituted C4 alkyl. In certain embodiments, R is optionally substituted C5 alkyl. In certain embodiments, R is unsubstituted C5 alkyl. In certain embodiments, R is optionally substituted C6 alkyl. In certain embodiments, R is unsubstituted C6 alkyl. In certain embodiments, R is optionally substituted C₇ alkyl. In certain embodiments, R is unsubstituted C₇ alkyl. In certain embodiments, R is of formula:

[chemical structure]

In certain embodiments, R is of formula:

[chemical structure]

In certain embodiments, R is of formula:

[chemical structure]

In certain embodiments, R is of formula:

[chemical structure]

In certain embodiments, R is of formula:

[chemical structure]

In certain embodiments, R is optionally substituted n-propyl. In certain embodiments, R is n-propyl optionally substituted with optionally substituted aryl. In certain embodiments, R is n-propyl optionally substituted with optionally substituted phenyl. In certain embodiments, R is n-propyl substituted with unsubstituted phenyl. In certain embodiments, R is optionally substituted butyl. In certain embodiments, R is optionally substituted n-butyl. In certain embodiments, R is n-butyl optionally substituted with optionally substituted aryl. In certain embodiments, R is n-butyl optionally substituted with optionally substituted phenyl. In certain embodiments, R is n-butyl substituted with unsubstituted phenyl. In certain embodiments, R is optionally substituted pentyl. In certain embodiments, R is optionally substituted n-pentyl. In certain embodiments, R is n-pentyl optionally substituted with optionally substituted aryl. In certain embodiments, R is n-pentyl optionally substituted with optionally substituted phenyl. In certain embodiments, R is n-pentyl substituted with unsubstituted phenyl. In certain embodiments, R is optionally substituted hexyl. In certain embodiments, R is optionally substituted n-hexyl. In certain embodiments, R is optionally substituted n-heptyl. In certain embodiments, R is optionally substituted n-octyl. In certain embodiments, R is alkyl optionally substituted with aryl (e.g., phenyl). In certain embodiments, R is optionally substituted acyl (e.g., —C(═O)Me).

[0205] In certain embodiments, R is optionally substituted alkenyl (e.g., substituted or unsubstituted C₂₋₆ alkenyl). In certain embodiments, R is substituted or unsubstituted C₂₋₆ alkenyl. In certain embodiments, R is substituted or unsubstituted C₂₋₅ alkenyl. In certain embodiments, R is of formula:

[chemical structure]

In certain embodiments, R is optionally substituted alkynyl (e.g., substituted or unsubstituted C₂₋₆ alkynyl). In certain embodiments, R is substituted or unsubstituted C₂₋₆ alkynyl. In certain embodiments, R is of formula:

[chemical structure]

In certain embodiments, R is optionally substituted carbocyclyl. In certain embodiments, R is optionally substituted aryl (e.g., phenyl or napthyl).

[0206] The chain length of a precursor substrate can be from C1-C40. Those substrates can have any degree and any kind of branching or saturation or chain structure, including, without limitation, aliphatic, alicyclic, and aromatic. In addition, they may include any functional groups including hydroxy, halogens, carbohydrates, phosphates, methyl-containing or nitrogen-containing functional groups.

[0207] In some embodiments, R is H, an optionally substituted C1-C11 alkyl, an optionally substituted C1-C11 alkenyl, an optionally substituted C1-C11 alkynyl, or an optionally substituted C1-C11 aralkyl.

[0208] For example, FIG. 3 shows a non-exclusive set of putative precursors for the cannabinoid pathway. Aliphatic carboxylic acids including four to eight total carbons (“C4”-“C8” in FIG. 3) and up to 10-12 total carbons with either linear or branched chains may be used as precursors for the heterologous pathway. Non-limiting examples include methanoic acid, butyric acid, pentanoic acid, hexanoic acid, heptanoic acid, isovaleric acid, octanoic acid, and decanoic acid. Additional precursors may include ethanoic acid and propanoic acid. In some embodiments, in addition to acids, the ester, salt, and acid forms may all be used as substrates. Substrates may have any degree and any kind of branching, saturation, and chain structure, including, without limitation, aliphatic, alicyclic, and aromatic. In addition, they may include any functional modifications or combination of modifications including, without limitation, halogenation, hydroxylation, amination, acylation, alkylation, phenylation, and/or installation of pendant carbohydrates, phosphates, sulfates, heterocycles, or lipids, or any other functional groups.

[0209] Substrates for any of the enzymes disclosed in this application may be provided exogenously or may be produced endogenously by a host cell. In some embodiments, the cannabinoids are produced from a glucose substrate, so that compounds of Formula 1 shown in FIG. 2 and CoA precursors are synthesized by the cell. In other embodiments, a precursor is fed into the reaction. In some embodiments, a precursor is a compound selected from Formulae 1-8 in FIG. 2.

[0210] Cannabinoids produced by methods disclosed in this application include rare cannabinoids. Due to the low concentrations at which cannabinoids, including rare cannabinoids, occur in nature, producing industrially significant amounts of isolated or purified cannabinoids from the Cannabis plant may become prohibitive, especially in the case of rare cannabinoids, due to, e.g., the large volumes of Cannabis plants, and the large amounts of space, labor, time, and capital requirements to grow, harvest, and/or process the plant materials (see, for example, Crandall, K., 2016. A Chronic Problem: Taming Energy Costs and Impacts from Marijuana Cultivation. EQ Research; Mills, E., 2012. The carbon footprint of indoor Cannabis production. Energy Policy, 46, pp. 58-67; Jourabchi, M. and M. Lahet. 2014. Electrical Load Impacts of Indoor Commercial Cannabis Production. Presented to the Northwest Power and Conservation Council; O'Hare, M., D. Sanchez, and P. Alstone. 2013. Environmental Risks and Opportunities in Cannabis Cultivation. Washington State Liquor and Cannabis Board; 2018. Comparing Cannabis Cultivation Energy Consumption. New Frontier Data; and Madhusoodanan, J., 2019. Can cannabis go green? Nature Outlook: Cannabis; all of which are incorporated by reference in this disclosure). The disclosure provided in this application represents a potentially efficient method for producing high yields of cannabinoids, including rare cannabinoids. The disclosure provided in this application also represents a potential method for addressing concerns related to agricultural practices and water usage associated with traditional methods of cannabinoid production (Dillis et al. “Water storage and irrigation practices for cannabis drive seasonal patterns of water extraction and use in Northern California.” Journal of Environmental Management 272 (2020): 110955, incorporated by reference in this disclosure).

[0211] Cannabinoids produced by the disclosed methods also include non-rare cannabinoids. Without being bound by a particular theory, the methods described in this application may be advantageous compared with traditional plant-based methods for producing non-rare cannabinoids. For example, methods provided in this application represent potentially efficient means for producing consistent and high yields of non-rare cannabinoids. With traditional methods of cannabinoid production, in which cannabinoids are harvested from plants, maintaining consistent and uniform conditions, including airflow, nutrients, lighting, temperature, and humidity, can be difficult. For example, with plant-based methods, there can be microclimates created by branching, which can lead to inconsistent yields and by-product formation. In some embodiments, the methods described in this application are more efficient at producing a cannabinoid of interest as compared to harvesting cannabinoids from plants. For example, with plant-based methods, seed-to-harvest can take up to half a year, while cutting-to-harvest usually takes about 4 months. Additional steps including drying, curing, and extraction are also usually needed with plant-based methods. In contrast, in some embodiments, the fermentation-based methods described in this application only take about 1, 2, 3, 4, 5, 6, 7, 8, 9, or 10 days. In some embodiments, the fermentation-based methods described in this application only take about 3-5 days. In some embodiments, the fermentation-based methods described in this application only take about 5 days. In some embodiments, the methods provided in this application reduce the amount of security needed to comply with regulatory standards. For example, a smaller secured area may be needed to be monitored and secured to practice the methods described in this application as compared to the cultivation of plants. In some embodiments, the methods described in this application are advantageous over plant-sourced cannabinoids.

### Polyketide Cyclase (PKC)

[0212] A host cell described in this application may comprise a PKC. As used in this application, a “PKC” refers to an enzyme that is capable of cyclizing a polyketide. Without being bound by a particular theory, a PKC may be advantageous in cannabinoid production because it promotes the formation of compounds of Formula 6 (a non-decarboxylated compound). Since prenyltransferases predominantly and often preferentially prenylate compounds of Formula 6, the cyclase activity of PKCs may be advantageous in increasing the efficiency of cannabinoid production by providing a preferred substrate for a downstream prenyltransferase.

[0213] In certain embodiments, a polyketide cyclase (PKC) catalyzes the cyclization of an oxo fatty acyl-CoA (e.g., a compound of Formula (4)):

[chemical structure]

[0214] or 3,5,7-trioxododecanoyl-COA, 3,5,7-trioxodecanoyl-COA) to the corresponding intramolecular cyclization product (e.g., compound of Formula (6), including olivetolic acid and divarinic acid). A compound of Formula (6) may also be referred to as a 2,4-dihydroxybenzoic acid. In some embodiments, a PKC catalyzes the formation of a compound which occurs in the presence of a PKS. PKC substrates include trioxoalkanol-CoA, such as 3,5,7-Trioxododecanoyl-CoA, or a compound of Formula (4):

[chemical structure]

[0215] wherein R is hydrogen, optionally substituted acyl, optionally substituted alkyl, optionally substituted alkenyl, optionally substituted alkynyl, optionally substituted carbocyclyl, or optionally substituted aryl. In certain embodiments, a PKC catalyzes a compound of Formula (4):

[chemical structure]

[0216] wherein R is hydrogen, optionally substituted acyl, optionally substituted alkyl, optionally substituted alkenyl, optionally substituted alkynyl, optionally substituted carbocyclyl, or optionally substituted aryl; to form a compound of Formula (6):

[chemical structure]

[0217] wherein R is hydrogen, optionally substituted acyl, optionally substituted alkyl, optionally substituted alkenyl, optionally substituted alkynyl, optionally substituted carbocyclyl, or optionally substituted aryl; as substrates. R is as definedprenyltransferase (PT). As used in this application. In some embodiments, R is a C₂-C₆ optionally substituted alkyl. In some embodiments, R is a propyl or pentyl. In some embodiments, R is pentyl. In some embodiments, R is propyl.

[0218] As one of ordinary skill in the art would appreciate, a PKC could be obtained from any source, including naturally occurring sources and synthetic sources (e.g., a non-naturally occurring PKC). In some embodiments, a PKC is from Cannabis. Non-limiting examples of PKCs include those disclosed in U.S. Pat. Nos. 9,611,460; 10,059,971; and U.S. Patent Application Publication No. 2019/0169661, which are incorporated by reference in this application in their entireties.

[0219] In some embodiments, a PKC is an olivetolic acid cyclase (OAC). In other embodiments, a PKC is a divarinic acid cyclase (DAC).

[0220] As used in this application, an “OAC” refers to an enzyme that is capable of catalyzing the formation of olivetolic acid (OA). In some embodiments, an OAC is capable of using a substrate of Formula (4a) (3,5,7-trioxododecanoyl-CoA):

[chemical structure]

[0221] to form a compound of Formula (6a) (olivetolic acid):

[chemical structure]

[0222] Olivetolic acid cyclase from Cannabis sativa (CsOAC) is a 101 amino acid enzyme that performs non-decarboxylative cyclization of the tetraketide product of olivetol synthase (FIG. 4 Structure 4a) via aldol condensation to form olivetolic acid (FIG. 4 Structure 6a). CsOAC was identified and characterized by Gagne et al. (Proc Natl Acad Sci USA. 2012 Jul. 31; 109(31):12811-6) via transcriptome mining, and its cyclization function was recapitulated in vitro to demonstrate that CsOAC is required for formation of olivetolic acid in Cannabis sativa. A crystal structure of the enzyme was published by Yang et al. (FEBS J. 2016 Mar.;283(6):1088-106), which revealed that the enzyme is a homodimer and belongs to the α+β barrel (DABB) superfamily of protein folds. CsOAC is the only known sequenced plant polyketide cyclase. Multiple fungal Type III polyketide synthases have been identified that perform both polyketide synthase and cyclization functions (Funa et al., J Biol Chem. 2007 May 11;282(19):14476-81); however, in plants such a dual function enzyme has not yet been discovered.

[0223] The wild-type amino acid sequence of CsOAC, which catalyzes the formation of olivetolic acid (OA) from 3,5,7-Trioxododecanoyl-CoA, is provided by UniProtKB-I 6WU39 (SEQ ID NO: 1):

(SEQ ID NO: 1)
MAVKHLIVLKFKDEITEAQKEEFFKTYVNLVNIIPAMKDVYWGKDVTQKNK
EEGYTHIVEVTFESVETIQDYIIHPAHVGFGDVYRSFWEKLLIFDYTPRK

[0224] A nucleic acid sequence encoding wild-type CsOAC is provided by SEQ ID NO: 2:

(SEQ ID NO: 2)
atggcagtgaagcatttgattgtattgaagttcaaagatgaaatcacagaa
gcccaaaaggaagaatttttcaagacgtatgtgaatcttgtgaatatcatc
ccagccatgaaagatgtatactggggtaaagatgtgactcaaaagaataag
gaagaagggtacactcacatagttgaggtaacatttgagagtgtggagact
attcaggactacattattcatcctgcccatgttggatttggagatgtctat
cgttctttctgggaaaaacttctcatttttgactacacaccacgaaag

[0225] A non-limiting additional example of a nucleic acid sequence encoding wild-type CsOAC includes:

(SEQ ID NO: 3)
atggccgtcaagcatctgattgtattgaaatttaaggacgagatcacggaa
gcacaaaaggaagaatttttcaaaacttatgttaatttagttaacataatc
cctgctatgaaggatgtctactggggtaaggatgtgacacagaaaaacaag
gaagaaggctacactcacattgtggaagttaccttcgagagcgttgaaact
attcaagactacatcatccaccccgctcatgtcggattcggtgatgtctat
cgttccttttgggaaaaattgttgattttcgactataccccaagaaagtaa

[0226] Multiple structural domains have been identified in the CsOAC protein. See, e.g., Table 2, which is based on output from the DSSP program, Tou et al., Nucleic Acids Res. 2015 Jan.;43(Database issue):D364-8 and Kabsch and Sander Biopolymers. 1983 Dec.;22(12):2577-637. In some embodiments, a PKC comprises one or more (e.g., at least 1, at least 2, at least 3, at least 4, at least 5, at least 6, at least 7, at least 8, at least 9, at least 10, at least 11, at least 12, at least 13, at least 14, or at least 15) of the domains listed in Table 2. As one of ordinary skill in the art would appreciate, multiple different computational analysis programs may be used to determine secondary structures in proteins, such as the CsOAC protein. Different computational analysis programs may define the boundaries of the secondary structures differently. Non-limiting examples of secondary structure analysis of wild-type CsOAC (SEQ ID NO: 1) may be found in Yang et al., FEBS J. 2016 Mar.;283(6):1088-106; Gagne et al., Proc Natl Acad Sci USA. 2012 Jul. 31; 109(31):12811-6; and under UniProtKB Accession No. I6WU39. It should be appreciated that throughout this disclosure, reference to structural domains in CsOAC are based on the structural domains as described in Table 2.

TABLE 2
Structural domains in CsOAC

| | Corresponding |
|---|---|
| | positions in |
| Domain | SEQ ID NO: 1 |
| beta sheet 1 | 1-11 |
| loop 1 | 12-16 |
| helix 1 | 17-29 |
| 310 helix 1 | 30-32 |
| loop 2 | 33-38 |
| beta sheet 2 | 39-44 |
| loop 3 | 45-56 |
| beta sheet 3 | 57-62 |
| loop 4 | 63-65 |
| helix 2 | 66-73 |
| turn 1 | 74-75 |
| helix 3 | 76-85 |
| 310 helix 2 | 86-88 |
| beta sheet 4 | 89-97 |
| loop 5 | 98-101 |

[0227] Residues H5, 17, L9, F₂₃, F₂₄, Y27, V28, L30, V40, V59, Y72, 173, H₇₈, F₈₁, G82, W89, L92, and 194 form the active site of wild-type CsOAC (SEQ ID NO: 1), with residues Y72 and H₇₈ being catalytic residues. See, e.g., Yang et al. (FEBS J. 2016 March;283(6):1088-106). In some embodiments, a PKC comprises the amino acid Y at a residue corresponding to position 72 in SEQ ID NO: 1 and comprises the amino acid H at a residue corresponding to position 78 in SEQ ID NO: 1.

[0228] In some embodiments, a PKC comprises a sequence that is at least 5%, at least 10%, at least 15%, at least 20%, at least 25%, at least 30%, at least 35%, at least 40%, at least 45%, at least 50%, at least 55%, at least 60%, at least 65%, at least 70%, at least 71%, at least 72%, at least 73%, at least 74%, at least 75%, at least 76%, at least 77%, at least 78%, at least 79%, at least 80%, at least 81%, at least 82%, at least 83%, at least 84%, at least 85%, at least 86%, at least 87%, at least 88%, at least 89%, at least 90%, at least 91%, at least 92%, at least 93%, at least 94%, at least 95%, at least 96%, at least 97%, at least 98%, at least 99%, or is 100% identical, including all values in between, to one or more of SEQ ID NOs: 1-3, 19-106, 107-194, 196-388, 389-581, 582-669, 671-742, 745-948, 949-1036, 1038-1109, or 1112-1315 or a sequence in Table 11. In some embodiments, the reference sequence is SEQ ID NO: 62. In some embodiments, the reference sequence is SEQ ID NO: 87. In some embodiments, the reference sequence is SEQ ID NO: 150. In some embodiments, the reference sequence is SEQ ID NO: 175. In some embodiments, the reference sequence is SEQ ID NO: 220. In some embodiments, the reference sequence is SEQ ID NO: 255. In some embodiments, a PKC comprises a sequence that is at most 5%, at most 10%, at most 15%, at most 20%, at most 25%, at most 30%, at most 35%, at most 40%, at most 45%, at most 50%, at most 55%, at most 60%, at most 65%, at most 70%, at most 71%, at most 72%, at most 73%, at most 74%, at most 75%, at most 76%, at most 77%, at most 78%, at most 79%, at most 80%, at most 81%, at most 82%, at most 83%, at most 84%, at most 85%, at most 86%, at most 87%, at most 88%, at most 89%, at most 90%, at most 91%, at most 92%, at most 93%, at most 94%, at most 95%, at most 96%, at most 97%, at most 98%, at most 99%, or is 100% identical, including all values in between, to one or more of SEQ ID NO: 1-3, 19-106, 107-194, 196-388, 389-581, 582-669, 671-742, 745-948, 949-1036, 1038-1109, or 1112-1315 or a sequence in Table 11. In some embodiments, a PKC comprises a sequence that is 5%, 10%, 15%, 20%, 25%, 30%, 35%, 40%, 45%, 50%, 55%, 60%, 65%, 70%, 71%, 72%, 73%, 74%, 75%, 76%, 77%, 78%, 79%, 80%, 81%, 82%, 83%, 84%, 85%, 86%, 87%, 88%, 89%, 90%, 91%, 92%, 93%, 94%, 95%, 96%, 97%, 98%, 99%, or 100% identical, including all values in between, to one or more of SEQ ID NOs: 1-3, 19-106, 107-194, 196-388, 389-581, 582-669, 671-742, 745-948, 949-1036, 1038-1109, or 1112-1315 or a sequence in Table 11. In some embodiments, the reference sequence is SEQ ID NO: 62. In some embodiments, the reference sequence is SEQ ID NO: 87. In some embodiments, the reference sequence is SEQ ID NO: 150. In some embodiments, the reference sequence is SEQ ID NO: 175. In some embodiments, the reference sequence is SEQ ID NO: 220. In some embodiments, the reference sequence is SEQ ID NO: 255.

[0229] In some embodiments, the reference sequence is SEQ ID NO: 19, 21, 23, 24, 26, 27, 29, 32, 33, 34, 35, 38, 40, 42, 43, 45, 48, 49, 50, 51, 53, 58, 60, 62, 65, 66, 67, 68, 78, 87, 91, 92, 94, 99, 103, 105, 219, 220, 231, 234, 240, 254, 255, 258 283, 289, 294, 344, 345, 349, 365, 582-603, 605, 606, 607, 608, 610, 611, 612, 614, 616, 617, 618, 622, 625, 627, 629, 631, 632, 633, 634, 637, 638, 639, 640, 641, 642, 643, 644, 646, 648, 651, 653, 654, 655, 656, 657, 658, 659, 660, 661, 662, 663, 666, 667, 668, 672, 673, 674, 675, 676, 679, 680, 683, 684, 685, 686, 691, 693, 694, 695, 696, 697, 699, 700, 703, 707, 711, 713, 714, 715, 724, 732, 734, 735, 736, 737, 738, 739, 749, 751, 765, 768, 790, 808, 810, 822, 828, 840, 846, 857, 862, 865, 921, 922, 858, 850, 851, 933, 871, 809, 926, 923, 924, 758, 747, 757, 875, 908, 823, 833, and 777. In some embodiments, the reference sequence is SEQ ID NO: 255. In some embodiments, the reference sequence is SEQ ID NO: 220. In some embodiments, the reference sequence is SEQ ID NO: 707. In some embodiments, the reference sequence is selected from the group consisting of SEQ ID NOs: 255, 749, 751, 765, 768, 790, 808, 810, 822, 828, 840, 846, 857, 862, 865, 921, 922, 858, 850, 851, 933, 871, 809, 926, 923, 924, 758, 747, 757, 875, 908, 823, 833, and 777.

[0230] In some embodiments, the reference sequence is selected from any one of SEQ ID NOs: 107-194, 389-581, 949-1036, 1038-1109, and 1112-1315. In some embodiments, the reference sequence is selected from any one of SEQ ID NOs: 107, 109, 111, 112, 114, 115, 117, 120, 121, 122, 123, 126, 128, 130, 131, 133, 136, 137, 138, 139, 141, 146, 148, 150, 153, 154, 155, 156, 166, 175, 179, 180, 182, 187, 191, 193, 412, 413, 424, 427, 433, 447, 448, 451, 476, 482, 487, 537, 538, 542, 558, 949-970, 1074, 972, 973, 974, 975, 977, 978, 979, 981, 983, 984, 985, 989, 992, 994, 996, 998, 999, 1000, 1001, 1004, 1005, 1006, 1007, 1008, 1009, 1010, 1011, 1013, 1015, 1018, 1020, 1021, 1022, 1023, 1024, 1025, 1026, 1027, 1028, 1029, 1030, 1033, 1034, 1035, 1039, 1040, 1041, 1042, 1043, 1046, 1047, 1050, 1051, 1052, 1053, 1058, 1060, 1061, 1062, 1063, 1064, 1066, 1067, 1070, 1078, 1080, 1081, 1082, 1091, 1099, 1101, 1102, 1103, 1104, 1105, 1106, 1116, 1118, 1132, 1135, 1157, 1175, 1177, 1189, 1195, 1207, 1213, 1224, 1229, 1232, 1288, 1289, 1225, 1217, 1218, 1300, 1238, 1176, 1293, 1290, 1291, 1125, 1114, 1124, 1242, 1275, 1190, 1200, and 1144. In some embodiments, the reference sequence is selected from the group consisting of SEQ ID NOs: 448, 1116, 1118, 1132, 1135, 1157, 1175, 1177, 1189, 1195, 1207, 1213, 1224, 1229, 1232, 1288, 1289, 1225, 1217, 1218, 1300, 1238, 1176, 1293, 1290, 1291, 1125, 1114, 1124, 1242, 1275, 1190, 1200, and 1144.

[0231] In some embodiments, the reference sequence is selected from any one of SEQ ID NOs: 283, 289, 294, 344, 345, 349, and 365. In some embodiments, the reference sequence is selected from any one of SEQ ID NOs: 62, 87, 220, 234, 219, 258, 231, 240, and 255. In some embodiments, the reference sequence is selected from any one of SEQ ID NOs: 62, 87, 220, 234, 219, 258, 231, 240, 255, 707, 749, 751, 765, 768, 790, 808, 810, 822, 828, 840, 846, 857, 862, 865, 921, and 922.

[0232] In some embodiments, a PKC comprises 1, 2, 3, 4, 5, 6, 7, 8, 9, 10, 11, 12, 13, 14, 15, 16, 17, 18, 19, 20, 21, 22, 23, 24, 25, 26, 27, 28, 29, 30, 31, 32, 33, 34, 35, 36, 37, 38, 39, 40, 41, 42, 43, 44, 45, 46, 47, 48, 49, 50, 51, 52, 53, 54, 55, 56, 57, 58, 59, 60, 61, 62, 63, 64, 65, 66, 67, 68, 69, 70, 71, 72, 73, 74, 75, 76, 77, 78, 79, 80, 81, 82, 83, 84, 85, 86, 87, 88, 89, 90, 91, 92, 93, 94, 95, 96, 97, 98, 99, 100, or 101 amino acid substitutions, deletions, or insertions relative to SEQ ID NO: 1, 19-106, 196-388, 582-669, 671-742, or 745-948 or an amino acid sequence in Table 11.

[0233] In some embodiments, a PKC consists of 1, 2, 3, 4, 5, 6, 7, 8, 9, 10, 11, 12, 13, 14, 15, 16, 17, 18, 19, 20, 21, 22, 23, 24, 25, 26, 27, 28, 29, 30, 31, 32, 33, 34, 35, 36, 37, 38, 39, 40, 41, 42, 43, 44, 45, 46, 47, 48, 49, 50, 51, 52, 53, 54, 55, 56, 57, 58, 59, 60, 61, 62, 63, 64, 65, 66, 67, 68, 69, 70, 71, 72, 73, 74, 75, 76, 77, 78, 79, 80, 81, 82, 83, 84, 85, 86, 87, 88, 89, 90, 91, 92, 93, 94, 95, 96, 97, 98, 99, 100, or 101 amino acid substitutions, deletions, or insertions relative to SEQ ID NO: 1, 19-106, or 196-388, 582-669, 671-742, or 745-948 or an amino acid sequence in Table 11.

[0234] In some embodiments, a PKC comprises at most 1, at most 2, at most 3, at most 4, at most 5, at most 6, at most 7, at most 8, at most 9, at most 10, at most 11, at most 12, at most 13, at most 14, at most 15, at most 16, at most 17, at most 18, at most 19, at most 20, at most 21, at most 22, at most 23, at most 24, at most 25, at most 26, at most 27, at most 28, at most 29, at most 30, at most 31, at most 32, at most 33, at most 34, at most 35, at most 36, at most 37, at most 38, at most 39, at most 40, at most 41, at most 42, at most 43, at most 44, at most 45, at most 46, at most 47, at most 48, at most 49, at most 50, at most 51, at most 52, at most 53, at most 54, at most 55, at most 56, at most 57, at most 58, at most 59, at most 60, at most 61, at most 62, at most 63, at most 64, at most 65, at most 66, at most 67, at most 68, at most 69, at most 70, at most 71, at most 72, at most 73, at most 74, at most 75, at most 76, at most 77, at most 78, at most 79, at most 80, at most 81, at most 82, at most 83, at most 84, at most 85, at most 86, at most 87, at most 88, at most 89, at most 90, at most 91, at most 92, at most 93, at most 94, at most 95, at most 96, at most 97, at most 98, at most 99, at most 100, or at most 101 amino acid substitutions, deletions, and/or insertions relative to SEQ ID NO: 1, 19-106, 196-388, 582-669, 671-742, or 745-948 or an amino acid sequence in Table 11.

[0235] In some embodiments, a PKC comprises 1, 2, 3, 4, 5, 6, 7, 8, 9, 10, 11, 12, 13, 14, 15, 16, 17, 18, 19, 20, 21, 22, 23, 24, 25, 26, 27, 28, 29, 30, 31, 32, 33, 34, 35, 36, 37, 38, 39, 40, 41, 42, 43, 44, 45, 46, 47, 48, 49, 50, 51, 52, 53, 54, 55, 56, 57, 58, 59, 60, 61, 62, 63, 64, 65, 66, 67, 68, 69, 70, 71, 72, 73, 74, 75, 76, 77, 78, 79, 80, 81, 82, 83, 84, 85, 86, 87, 88, 89, 90, 91, 92, 93, 94, 95, 96, 97, 98, 99, 100, 101, 102, 103, 104, 105, 106, 107, 108, 109, 110, 111, 112, 113, 114, 115, 116, 117, 118, 119, 120, 121, 122, 123, 124, 125, 126, 127, 128, 129, 130, 131, 132, 133, 134, 135, 136, 137, 138, 139, 140, 141, 142, 143, 144, 145, 146, 147, 148, 149, 150, 151, 152, 153, 154, 155, 156, 157, 158, 159, 160, 161, 162, 163, 164, 165, 166, 167, 168, 169, 170, 171, 172, 173, 174, 175, 176, 177, 178, 179, 180, 181, 182, 183, 184, 185, 186, 187, 188, 189, 190, 191, 192, 193, 194, 195, 196, 197, 198, 199, 200, 201, 202, 203, 204, 205, 206, 207, 208, 209, 210, 211, 212, 213, 214, 215, 216, 217, 218, 219, 220, 221, 222, 223, 224, 225, 226, 227, 228, 229, 230, 231, 232, 233, 234, 235, 236, 237, 238, 239, 240, 241, 242, 243, 244, 245, 246, 247, 248, 249, 250, 251, 252, 253, 254, 255, 256, 257, 258, 259, 260, 261, 262, 263, 264, 265, 266, 267, 268, 269, 270, 271, 272, 273, 274, 275, 276, 277, 278, 279, 280, 281, 282, 283, 284, 285, 286, 287, 288, 289, 290, 291, 292, 293, 294, 295, 296, 297, 298, 299, 300, 301, 302, or 303 nucleic acid substitutions, deletions, and/or insertions relative to one or more of SEQ ID NOs: 2-3, 107-194, 389-581, 949-1036, 1038-1109 and 1112-1315 or a nucleic acid sequence in Table 11.

[0236] In some embodiments, a PKC consists of 1, 2, 3, 4, 5, 6, 7, 8, 9, 10, 11, 12, 13, 14, 15, 16, 17, 18, 19, 20, 21, 22, 23, 24, 25, 26, 27, 28, 29, 30, 31, 32, 33, 34, 35, 36, 37, 38, 39, 40, 41, 42, 43, 44, 45, 46, 47, 48, 49, 50, 51, 52, 53, 54, 55, 56, 57, 58, 59, 60, 61, 62, 63, 64, 65, 66, 67, 68, 69, 70, 71, 72, 73, 74, 75, 76, 77, 78, 79, 80, 81, 82, 83, 84, 85, 86, 87, 88, 89, 90, 91, 92, 93, 94, 95, 96, 97, 98, 99, 100, 101, 102, 103, 104, 105, 106, 107, 108, 109, 110, 111, 112, 113, 114, 115, 116, 117, 118, 119, 120, 121, 122, 123, 124, 125, 126, 127, 128, 129, 130, 131, 132, 133, 134, 135, 136, 137, 138, 139, 140, 141, 142, 143, 144, 145, 146, 147, 148, 149, 150, 151, 152, 153, 154, 155, 156, 157, 158, 159, 160, 161, 162, 163, 164, 165, 166, 167, 168, 169, 170, 171, 172, 173, 174, 175, 176, 177, 178, 179, 180, 181, 182, 183, 184, 185, 186, 187, 188, 189, 190, 191, 192, 193, 194, 195, 196, 197, 198, 199, 200, 201, 202, 203, 204, 205, 206, 207, 208, 209, 210, 211, 212, 213, 214, 215, 216, 217, 218, 219, 220, 221, 222, 223, 224, 225, 226, 227, 228, 229, 230, 231, 232, 233, 234, 235, 236, 237, 238, 239, 240, 241, 242, 243, 244, 245, 246, 247, 248, 249, 250, 251, 252, 253, 254, 255, 256, 257, 258, 259, 260, 261, 262, 263, 264, 265, 266, 267, 268, 269, 270, 271, 272, 273, 274, 275, 276, 277, 278, 279, 280, 281, 282, 283, 284, 285, 286, 287, 288, 289, 290, 291, 292, 293, 294, 295, 296, 297, 298, 299, 300, 301, 302, or 303 nucleic acid substitutions, deletions, and/or insertions relative to one or more of SEQ ID NOs: 2-3, 107-194, 389-581, 949-1036, 1038-1109 and 1112-1315 or a nucleic acid sequence in Table 11.

[0237] In some embodiments, a PKC comprises at most 1, at most 2, at most 3, at most 4, at most 5, at most 6, at most 7, at most 8, at most 9, at most 10, at most 11, at most 12, at most 13, at most 14, at most 15, at most 16, at most 17, at most 18, at most 19, at most 20, at most 21, at most 22, at most 23, at most 24, at most 25, at most 26, at most 27, at most 28, at most 29, at most 30, at most 31, at most 32, at most 33, at most 34, at most 35, at most 36, at most 37, at most 38, at most 39, at most 40, at most 41, at most 42, at most 43, at most 44, at most 45, at most 46, at most 47, at most 48, at most 49, at most 50, at most 51, at most 52, at most 53, at most 54, at most 55, at most 56, at most 57, at most 58, at most 59, at most 60, at most 61, at most 62, at most 63, at most 64, at most 65, at most 66, at most 67, at most 68, at most 69, at most 70, at most 71, at most 72, at most 73, at most 74, at most 75, at most 76, at most 77, at most 78, at most 79, at most 80, at most 81, at most 82, at most 83, at most 84, at most 85, at most 86, at most 87, at most 88, at most 89, at most 90, at most 91, at most 92, at most 93, at most 94, at most 95, at most 96, at most 97, at most 98, at most 99, at most 100, at most 101, at most 102, at most 103, at most 104, at most 105, at most 106, at most 107, at most 108, at most 109, at most 110, at most 111, at most 112, at most 113, at most 114, at most 115, at most 116, at most 117, at most 118, at most 119, at most 120, at most 121, at most 122, at most 123, at most 124, at most 125, at most 126, at most 127, at most 128, at most 129, at most 130, at most 131, at most 132, at most 133, at most 134, at most 135, at most 136, at most 137, at most 138, at most 139, at most 140, at most 141, at most 142, at most 143, at most 144, at most 145, at most 146, at most 147, at most 148, at most 149, at most 150, at most 151, at most 152, at most 153, at most 154, at most 155, at most 156, at most 157, at most 158, at most 159, at most 160, at most 161, at most 162, at most 163, at most 164, at most 165, at most 166, at most 167, at most 168, at most 169, at most 170, at most 171, at most 172, at most 173, at most 174, at most 175, at most 176, at most 177, at most 178, at most 179, at most 180, at most 181, at most 182, at most 183, at most 184, at most 185, at most 186, at most 187, at most 188, at most 189, at most 190, at most 191, at most 192, at most 193, at most 194, at most 195, at most 196, at most 197, at most 198, at most 199, at most 200, at most 201, at most 202, at most 203, at most 204, at most 205, at most 206, at most 207, at most 208, at most 209, at most 210, at most 211, at most 212, at most 213, at most 214, at most 215, at most 216, at most 217, at most 218, at most 219, at most 220, at most 221, at most 222, at most 223, at most 224, at most 225, at most 226, at most 227, at most 228, at most 229, at most 230, at most 231, at most 232, at most 233, at most 234, at most 235, at most 236, at most 237, at most 238, at most 239, at most 240, at most 241, at most 242, at most 243, at most 244, at most 245, at most 246, at most 247, at most 248, at most 249, at most 250, at most 251, at most 252, at most 253, at most 254, at most 255, at most 256, at most 257, at most 258, at most 259, at most 260, at most 261, at most 262, at most 263, at most 264, at most 265, at most 266, at most 267, at most 268, at most 269, at most 270, at most 271, at most 272, at most 273, at most 274, at most 275, at most 276, at most 277, at most 278, at most 279, at most 280, at most 281, at most 282, at most 283, at most 284, at most 285, at most 286, at most 287, at most 288, at most 289, at most 290, at most 291, at most 292, at most 293, at most 294, at most 295, at most 296, at most 297, at most 298, at most 299, at most 300, at most 301, at most 302, at most 303 nucleic acid substitutions, deletions, and/or insertions relative to one or more of SEQ ID NOs: 2-3, 107-194, 389-581, 949-1036, 1038-1109, or 1112-1315 or a nucleic acid sequence in Table 11.

[0238] In some embodiments, a PKC comprises an amino acid substitution, deletion, or insertion at a residue corresponding to position 1, 2, 3, 4, 5, 6, 7, 8, 9, 10, 11, 12, 13, 14, 15, 16, 17, 18, 19, 20, 21, 22, 23, 24, 25, 26, 27, 28, 29, 30, 31, 32, 33, 34, 35, 36, 37, 38, 39, 40, 41, 42, 43, 44, 45, 46, 47, 48, 49, 50, 51, 52, 53, 54, 55, 56, 57, 58, 59, 60, 61, 62, 63, 64, 65, 66, 67, 68, 69, 70, 71, 72, 73, 74, 75, 76, 77, 78, 79, 80, 81, 82, 83, 84, 85, 86, 87, 88, 89, 90, 91, 92, 93, 94, 95, 96, 97, 98, 99, 100, and/or 101 in SEQ ID NO: 1. As a non-limiting example, position 83 in SEQ ID NO: 1 has the amino acid “D.” A PKC that comprises an amino acid substitution, deletion, or insertion at a residue corresponding to position 83 in SEQ ID NO: 1 would not comprise the amino acid “D” at the corresponding position. In some embodiments, a PKC comprises one or more amino acid substitutions or deletions selected from the amino acid substitutions or deletions provided in Tables 4-8, 9A-9B, and/or 10.

[0239] In some embodiments, a PKC comprises one or more amino acid substitutions at a residue corresponding to position 18, 29, 53, 70, 82, and/or 83 in SEQ ID NO: 1. In some embodiments, the PKC comprises the amino acid H at a residue corresponding to position 53 in SEQ ID NO: 1, the amino acid K at a residue corresponding to position 82 in SEQ ID NO: 1, and/or the amino acid L at a residue corresponding to position 70 in SEQ ID NO: 1. In some embodiments, a PKC comprises the amino acid substitution E53H, G82K, and/or Q70L relative to SEQ ID NO: 1.

[0240] In some embodiments, the amino acid substitution G82K may increase the abundance of a PKC (e.g., by at least 10%, 20%, 30%, 40%, or 50%) relative to its wild-type counterpart (e.g., SEQ ID NO: 1), while substantially maintaining olivetolic acid production activity relative to olivetolic acid production by its wild-type counterpart (e.g., at least 80%, 85%, 90%, or 95% of wild-type activity). It is unexpected that a PKC comprising the amino acid substitution G82K relative to SEQ ID NO: 1 would be capable of producing at least 80%, 85%, 90%, or 95% of the amount of olivetolic acid produced by its wild-type counterpart because the amino acid substitution G82K is a non-conservative amino acid substitution of a residue that is in the active site with close proximity to a bound substrate. Glycine includes hydrogen only in the “R” group, whereas lysine includes 4 carbons and a positively charged amine group. Without being bound by a particular theory, the amine group of lysine may interact with the hydroxyl or carboxyl groups on olivetolic acid. In some embodiments, without being bound by a particular theory, the effect of the G82K amino acid substitution alone may be minimal in terms of increasing olivetolic acid production of a PKC (e.g., SEQ ID NO: 1), but the G82K amino acid substitution may be advantageous in increasing olivetolic acid production of a PKC when used in combination with other amino acid substitutions or deletions. In some of those embodiments where the PKC comprises the amino acid substitution G82K relative to SEQ ID NO: 1, the PKC further comprises A18D, D83E or D83K, E22K, N29S, Q70L, S87K, and/or T26A.

[0241] In some embodiments, a PKC comprises an amino acid substitution or deletion at a residue corresponding to position 2, 18, 22, 24, 25, 26, 28, 29, 33, 52, 53, 57, 60, 62, 70, 82, 83, 84, 87, and/or 88 in SEQ ID NO: 1. In some embodiments, the PKC comprises an amino acid substitution at a residue corresponding to position 18, 29, 53, 70, 82 and/or 83 in SEQ ID NO:1.In some embodiments, a PKC comprises: a deletion at a residue corresponding to position 2 in SEQ ID NO: 1; the amino acid D or R at a residue corresponding to position 18 in SEQ ID NO: 1; the amino acid K at a residue corresponding to position 22 in SEQ ID NO: 1; the amino acid M at a residue corresponding to position 24 in SEQ ID NO: 1; the amino acid N at a residue corresponding to position 25 in SEQ ID NO: 1; the amino acid A or H at a residue corresponding to position 26 in SEQ ID NO: 1; the amino acid E at a residue corresponding to position 28 in SEQ ID NO: 1; the amino acid E or S at a residue corresponding to position 29 in SEQ ID NO: 1; the amino acid H or R at a residue corresponding to position 33 in SEQ ID NO: 1; the amino acid H at a residue corresponding to position 52 in SEQ ID NO: 1; the amino acid H at a residue corresponding to position 53 in SEQ ID NO: 1; the amino acid Y at a residue corresponding to position 57 in SEQ ID NO: 1; the amino acid I at a residue corresponding to position 60 in SEQ ID NO: 1; the amino acid M at a residue corresponding to position 62 in SEQ ID NO: 1; the amino acid L at a residue corresponding to position 70 in SEQ ID NO: 1; the amino acid K at a residue corresponding to position 82 in SEQ ID NO: 1; the amino acid A, K, or R at a residue corresponding to position 83 in SEQ ID NO: 1; the amino acid F or K at a residue corresponding to position 84 in SEQ ID NO: 1; the amino acid C or K at a residue corresponding to position 87 in SEQ ID NO: 1; and/or the amino acid Y at a residue corresponding to position 88 in SEQ ID NO: 1. In some embodiments, a PKC comprises a combination of amino acid substitutions or deletions relative to SEQ ID NO: 1 that is in Table 4. In some embodiments, relative to SEQ ID NO: 1, the PKC comprises: E53H, G82K, and Q70L. As a non-limiting example, relative to SEQ ID NO: 1, a PKC may comprise A18D, T26A, V28E, N29S, E53H, E601, Q70L, G82K, D83A, and S87K; A18D, E22K, N29S, E53H, Q70L, G82K, D83R, S87K, and F₈₈Y; A18D, E22K, N29S, E53H, Q70L, G82K, D83K, S87K, and F₈₈Y; A18D, E22K, N29S, I33R, E53H, Q70L, G82K, D83A, S87K, and F₈₈Y; A18D, E22K, K25N, T26A, N29S, E53H, Q70L, G82K, D83A, and S87K; A18D, E22K, N29S, E53H, Q70L, G82K, D83A, V84K, S87K, and F₈₈Y; A18D, E22K, T26A, N29S, E53H, Q70L, G82K, D83A, S87K, and F₈₈Y; A18D, E22K, T26H, N29S, E53H, Q70L, G82K, D83A, S87K, and F₈₈Y; A18D, E22K, N29S, I33H, E53H, Q70L, G82K, D83A, S87K, and F₈₈Y; A18D, E22K, N29S, E53H, Q70L, G82K, D83A, V84F, S87K, and F₈₈Y; A18D, T26A, N29S, E53H, Q70L, G82K, D83A, and F₈₈Y; A18D, E22K, T26A, N29S, E53H, Q70L, G82K, D83A, and S87K; A18D, T26A, N29S, E53H, Q70L, G82K, D83A, S87K, and F₈₈Y; A18D, T26A, N29S, E53H, Q70L, G82K, and D83A; A18D, E22K, T26A, N29S, E53H, Q70L, G82K, D83A, and F₈₈Y; A18D, E22K, N29S, E53H, Q70L, G82K, D83A, S87K, and F₈₈Y; A18D, T26A, V28E, N29S, E53H, Q70L, G82K, D83A, and S87K; A18R, E22K, N29S, E53H, Q70L, G82K, D83A, S87K, and F₈₈Y; deletion of a residue corresponding to position 2 in SEQ ID NO: 1, A18D, E22K, N29S, E53H, Q70L, G82K, D83A, S87K, and F₈₈Y; A18D, E22K, N29S, E53H, T62M, Q70L, G82K, D83A, S87K, and F₈₈Y; A18D, E22K, T26A, N29E, E53H, Q70L, G82K, D83A, and S87K; A18D, E22K, N29S, E52H, E53H, Q70L, G82K, D83A, S87K, and F₈₈Y; A18D, E22K, N29S, E53H, Q70L, G82K, D83A, S87C, and F₈₈Y; A18D, E22K, F₂₄M, N29S, E53H, Q70L, G82K, D83A, S87K, and F₈₈Y; A18D, N29S, E53H, Q70L, G82K, D83A, and F₈₈Y; A18D, N29S, E53H, Q70L, G82K, D83A, S87K, and F₈₈Y; or A18D, E22K, T26A, N29S, E53H, H₅₇Y, Q70L, G82K, D83A, and S87K. In some embodiments, a PKC comprises A18D, E22K, T26A, N29S, E53H, H₅₇Y, Q70L, G82K, D83A, and S87K. In some embodiments, a PKC comprises A18D, E22K, K25N, T26A, N29S, E53H, Q70L, G82K, D83A, and S87K.

[0242] In some embodiments, the PKC comprises: A18D, T26A, V28E, N29S, E53H, E601, Q70L, G82K, D83A, and S87K; A18D, E22K, N29S, E53H, Q70L, G82K, D83R, S87K, and F₈₈Y; A18D, E22K, N29S, E53H, Q70L, G82K, D83K, S87K, and F₈₈Y; A18D, E22K, N29S, I33R, E53H, Q70L, G82K, D83A, S87K, and F₈₈Y; A18D, E22K, K25N, T26A, N29S, E53H, Q70L, G82K, D83A, and S87K; A18D, E22K, N29S, E53H, Q70L, G82K, D83A, V84K, S87K, and F₈₈Y; A18D, E22K, T26A, N29S, E53H, Q70L, G82K, D83A, S87K, and F₈₈Y; A18D, E22K, T26H, N29S, E53H, Q70L, G82K, D83A, S87K, and F₈₈Y; A18D, E22K, N29S, I33H, E53H, Q70L, G82K, D83A, S87K, and F₈₈Y; A18D, E22K, N29S, E53H, Q70L, G82K, D83A, V84F, S87K, and F₈₈Y; A18D, T26A, N29S, E53H, Q70L, G82K, D83A, and F₈₈Y; A18D, E22K, T26A, N29S, E53H, Q70L, G82K, D83A, and S87K; A18D, T26A, N29S, E53H, Q70L, G82K, D83A, S87K, and F₈₈Y; A18D, T26A, N29S, E53H, Q70L, G82K, and D83A; A18D, E22K, T26A, N29S, E53H, Q70L, G82K, D83A, and F₈₈Y; A18D, E22K, N29S, E53H, Q70L, G82K, D83A, S87K, and F₈₈Y; A18D, T26A, V28E, N29S, E53H, Q70L, G82K, D83A, and S87K; A18R, E22K, N29S, E53H, Q70L, G82K, D83A, S87K, and F₈₈Y; deletion of a residue corresponding to position 2 in SEQ ID NO: 1, A18D, E22K, N29S, E53H, Q70L, G82K, D83A, S87K, and F₈₈Y; A18D, E22K, N29S, E53H, T62M, Q70L, G82K, D83A, S87K, and F₈₈Y; A18D, E22K, T26A, N29E, E53H, Q70L, G82K, D83A, and S87K; A18D, E22K, N29S, E52H, E53H, Q70L, G82K, D83A, S87K, and F₈₈Y; A18D, E22K, N29S, E53H, Q70L, G82K, D83A, S87C, and F₈₈Y; A18D, E22K, F₂₄M, N29S, E53H, Q70L, G82K, D83A, S87K, and F₈₈Y; A18D, N29S, E53H, Q70L, G82K, D83A, and F₈₈Y; A18D, N29S, E53H, Q70L, G82K, D83A, S87K, and F₈₈Y; A18D, E22K, T26A, N29S, E53H, H₅₇Y, Q70L, G82K, D83A, and S87K; I33R, E52H, Y55F, Q70A, G80A, D83K, and V84K; D13R, A18D, N29S, Q70L, D71Q, G80A, and D83K; I33R, E52H, Y55F, Q70A, I74G, and D83K; T26R, I33H, E52H, Y55F, Q70A, and D83K; A18D, T26R, E52H, Y55F, Q70A, G80A, D83N, V84K, and Y85A; T26R, I33H, Y55F, Q70A, G80A, D83K, and Y85A; E22K, T26H, N29S, D39G, K49Q, E52H, D83N, and V84K; E17N, A18D, V31L, D71S, D83A, and V84F; or A18D, V31L, D39Q, D71S, D83A, and V84F.

[0243] In some embodiments, the PKC comprises an amino acid substitution at a residue corresponding to position 17, 18, 26, 29, 31, 33, 37, 39, 71, 80, 83, 84, and/or 95 in SEQ ID NO: 1. In some embodiments, the PKC comprises: the amino acid N at a residue corresponding to position 17 in SEQ ID NO: 1; the amino acid D at a residue corresponding to position 18 in SEQ ID NO: 1; the amino acid A or H at a residue corresponding to position 26 in SEQ ID NO: 1; the amino acid T at a residue corresponding to position 29 in SEQ ID NO: 1; the amino acid L at a residue corresponding to position 31 in SEQ ID NO: 1; the amino acid R, H, or N at a residue corresponding to position 33 in SEQ ID NO: 1; the amino acid L at a residue corresponding to position 37 in SEQ ID NO: 1; the amino acid Q or G at a residue corresponding to position 39 in SEQ ID NO: 1; the amino acid S at a residue corresponding to position 71 in SEQ ID NO: 1; the amino acid A at a residue corresponding to position 80 in SEQ ID NO: 1; the amino acid Q, N, or A at a residue corresponding to position 83 in SEQ ID NO: 1; the amino acid F at a residue corresponding to position 84 in SEQ ID NO: 1; and/or the amino acid M at a residue corresponding to position 95 in SEQ ID NO: 1. In some embodiments, relative to SEQ ID NO: 1, the PKC comprises: E17N, A18D, and D39G; D39Q, and F₉₅M; I33N and F₉₅M; E17N, I33R, and F₉₅M; T26H, D83Q, and F₉₅M; I33H, D39Q, and D71S; N29T, I33N, and D71S; I33N, D39Q, and F₉₅M; D71S, D83N, and F₉₅M; D39Q and D83Q; A18D and M37L; E17N, A18D, and I33N; D39G, D71S, and V84F; N29T and D39G; A18D, D71S, and G80A; N29T, V31L, and D39Q; A18D, V31L, and D39G; T26H, N29T, and D39Q; T26A, N29T, and I33H; D39Q, D71S, and G80A; A18D, D39Q, and V84F; E17N, I33R, and D39Q; E17N, D71S, and F₉₅M; E17N, I33N, and F₉₅M; T26A, N29T, and V31L; E17N, T26A, and D39G; A18D, D39Q, and D71S; V31L, D39G, and V84F; N29T, I33R, and D39Q; D39G, D71S, and D83N; V31L, D71S, and D83Q; 133R, D39Q, and V84F; D39G and D71S; E17N, I33H, and D71S; T26H, D39G, and V84F; A18D, 133R, and D39G; T26A, D83N, and F₉₅M; V31L, I33H, and D71S; V31L, D39G, and D71S; A18D and D39Q; I33R, D39G, and D71S; E17N, G80A, and D83N; A18D, N29T, and V31L; D39Q, D71S, and D83A; A18D, T26H, and D39Q; T26A and F₉₅M; I33H, D39G, and D83Q; T26H, 133N, and G80A; I33R, D39G, and F₉₅M; V31L, I33R, and D83N; N29T, D39G, and V84F; D71S and D83Q; I33H, D39Q, and G80A; E17N, D39G, and D83A; E17N, 133N, and V84F; N29T, I33N, and D83Q; I33N, D71S, and G80A; I33R, D39G, and D83N; T26A and N29T; I33H, D83Q, and F₉₅M; T26A, V31L, and D39Q; E17N, V31L, and I33N; E17N, T26A, and M37L; or N29T and I33N.

[0244] In some embodiments, the PKC comprises an amino acid substitution at a residue corresponding to position 13, 18, 22, 26, 29, 33, 39, 49, 52, 55, 61, 64, 65, 66, 68, 70, 71, 74, 80, 83, 84, 85, and/or 98 in SEQ ID NO: 1. In some embodiments, the PKC comprises: the amino acid R at a residue corresponding to position 13 in SEQ ID NO: 1; the amino acid D at a residue corresponding to position 18 in SEQ ID NO: 1; the amino acid K at a residue corresponding to position 22 in SEQ ID NO: 1; the amino acid R or H at a residue corresponding to position 26 in SEQ ID NO: 1; the amino acid S at a residue corresponding to position 29 in SEQ ID NO: 1; the amino acid R or H at a residue corresponding to position 33 in SEQ ID NO: 1; the amino acid G at a residue corresponding to position 39 in SEQ ID NO: 1; the amino acid Q at a residue corresponding to position 49 in SEQ ID NO: 1; the amino acid H at a residue corresponding to position 52 in SEQ ID NO: 1; the amino acid F at a residue corresponding to position 55 in SEQ ID NO: 1; the amino acid D at a residue corresponding to position 61 in SEQ ID NO: 1; the amino acid D at a residue corresponding to position 64 in SEQ ID NO: 1; the amino acid N at a residue corresponding to position 65 in SEQ ID NO: 1; the amino acid Y at a residue corresponding to position 66 in SEQ ID NO: 1; the amino acid G at a residue corresponding to position 68 in SEQ ID NO: 1; the amino acid A or L at a residue corresponding to position 70 in SEQ ID NO: 1; the amino acid E or Q at a residue corresponding to position 71 in SEQ ID NO: 1; the amino acid G at a residue corresponding to position 74 in SEQ ID NO: 1; the amino acid N or A at a residue corresponding to position 80 in SEQ ID NO: 1; the amino acid K or N at a residue corresponding to position 83 in SEQ ID NO: 1; the amino acid K at a residue corresponding to position 84 in SEQ ID NO: 1; the amino acid F or A at a residue corresponding to position 85 in SEQ ID NO: 1; and/or the amino acid E or K at a residue corresponding to position 98 in SEQ ID NO: 1. In some embodiments, relative to SEQ ID NO: 1, the PKC comprises: Y85F; E64D, D71E, and T98K; S65N; V66Y; G80N; T68G; D71E; E64D and D71E; D71E and Y85F; I33R, E52H, Y55F, Q70A, G80A, D83K, and V84K; D13R, A18D, N29S, Q70L, D71Q, G80A, and D83K; I33R, E52H, Y55F, Q70A, I74G, and D83K; Y55F, G80A, and D83K; T26R, I33H, E52H, Y55F, Q70A, and D83K; A18D, T26R, E52H, Y55F, Q70A, G80A, D83N, V84K, and Y85A; T98E; T26R, I33H, Y55F, Q70A, G80A, D83K, and Y85A; V61D; or E22K, T26H, N29S, D39G, K49Q, E52H, D83N, and V84K.

[0245] In some embodiments, the PKC comprises an amino acid substitution at a residue corresponding to position 13, 17, 18, 22, 26, 29, 31, 33, 39, 52, 55, 61, 64, 65, 66, 70, 71, 74, 80, 82, 83, 84, 85, 88, 95, and/or 98 in SEQ ID NO: 1. In some embodiments, the PKC comprises: the amino acid R at a residue corresponding to position 13 in SEQ ID NO: 1; the amino acid N at a residue corresponding to position 17 in SEQ ID NO: 1; the amino acid D at a residue corresponding to position 18 in SEQ ID NO: 1; the amino acid K at a residue corresponding to position 22 in SEQ ID NO: 1; the amino acid R at a residue corresponding to position 26 in SEQ ID NO: 1; the amino acid S at a residue corresponding to position 29 in SEQ ID NO: 1; the amino acid L at a residue corresponding to position 31 in SEQ ID NO: 1; the amino acid H, N, or R at a residue corresponding to position 33 in SEQ ID NO: 1; the amino acid G or Q at a residue corresponding to position 39 in SEQ ID NO: 1; the amino acid H at a residue corresponding to position 52 in SEQ ID NO: 1; the amino acid F at a residue corresponding to position 55 in SEQ ID NO: 1; the amino acid S at a residue corresponding to position 61 in SEQ ID NO: 1; the amino acid D at a residue corresponding to position 64 in SEQ ID NO: 1; the amino acid N at a residue corresponding to position 65 in SEQ ID NO: 1; the amino acid Y at a residue corresponding to position 66 in SEQ ID NO: 1; the amino acid A or L at a residue corresponding to position 70 in SEQ ID NO: 1; the amino acid E, Q, or S at a residue corresponding to position 71 in SEQ ID NO: 1; the amino acid G at a residue corresponding to position 74 in SEQ ID NO: 1; the amino acid A at a residue corresponding to position 80 in SEQ ID NO: 1; the amino acid R at a residue corresponding to position 82 in SEQ ID NO: 1; the amino acid A, E, K, or N at a residue corresponding to position 83 in SEQ ID NO: 1; the amino acid F or K at a residue corresponding to position 84 in SEQ ID NO: 1; the amino acid A or F at a residue corresponding to position 85 in SEQ ID NO: 1; the amino acid N at a residue corresponding to position 88 in SEQ ID NO: 1; the amino acid M at a residue corresponding to position 95 in SEQ ID NO: 1; and/or the amino acid K or Y at a residue corresponding to position 98 in SEQ ID NO: 1.

[0246] In some embodiments, the PKC comprises an amino acid substitution at a residue corresponding to position 13, 17, 18, 22, 26, 31, 33, 39, 52, 55, 64, 65, 66, 70, 71, 74, 80, 82, 83, 84, 85, 88, and/or 98 in SEQ ID NO: 1. In some embodiments, the PKC comprises: the amino acid R at a residue corresponding to position 13 in SEQ ID NO:1; the amino acid N at a residue corresponding to position 17 in SEQ ID NO:1; the amino acid D at a residue corresponding to position 18 in SEQ ID NO:1; the amino acid K at a residue corresponding to position 22 in SEQ ID NO:1; the amino acid R at a residue corresponding to position 26 in SEQ ID NO:1; the amino acid L at a residue corresponding to position 31 in SEQ ID NO:1; the amino acid R, H, or N at a residue corresponding to position 33 in SEQ ID NO:1; the amino acid G at a residue corresponding to position 39 in SEQ ID NO:1; the amino acid H at a residue corresponding to position 52 in SEQ ID NO:1; the amino acid F at a residue corresponding to position 55 in SEQ ID NO:1; the amino acid D at a residue corresponding to position 64 in SEQ ID NO:1; the amino acid N at a residue corresponding to position 65 in SEQ ID NO:1; the amino acid Y at a residue corresponding to position 66 in SEQ ID NO:1; the amino acid A at a residue corresponding to position 70 in SEQ ID NO:1; the amino acid S or E at a residue corresponding to position 71 in SEQ ID NO:1; the amino acid R at a residue corresponding to position 82 in SEQ ID NO: 1; the amino acid G at a residue corresponding to position 74 in SEQ ID NO:1; the amino acid A at a residue corresponding to position 80 in SEQ ID NO:1; the amino acid E, A, K, or N at a residue corresponding to position 83 in SEQ ID NO:1; the amino acid K or F at a residue corresponding to position 84 in SEQ ID NO:1; the amino acid F at a residue corresponding to position 85 in SEQ ID NO:1; the amino acid N at a residue corresponding to position 88 in SEQ ID NO: 1; and/or the amino acid K or Y at a residue corresponding to position 98 in SEQ ID NO:1. In some embodiments, relative to SEQ ID NO: 1, the PKC comprises: A18D, T26R, I33R, D39G, E52H, Y55F, E64D, Q70A, G80A, D83N, and V84K; E17N, T26R, V31L, D71S, D83E, and V84F; E17N, V31L, I33N, E64D, D71S, and V84F; E17N, A18D, V31L, D71S, D83A, and V84F; E17N, E22K, V31L, I33N, D71E, and V84F; E17N, A18D, V31L, D71E, D83A, and V84F; E17N, V31L, D71S, D83E, V84F, and T98Y; V84K, T26R, D39G, D83E, T98K, and S65N; E17N, A18D, V31L, I33N, D71S, D83E, and V84K; E17N, A18D, V31L, D71S, I74G, D83E, and V84F; E17N, V31L, I33N, D71S, V84K, and Y85F; A18D, T26R, I33R, E52H, Y55F, V66Y, Q70A, G80A, D83N, V84K, and Y85F; E17N, A18D, V31L, I33N, D71S, D83K, and V84K; E17N, A18D, T26R, V31L, I33N, D71S, and V84K; V84K, T26R, D39G, D13R, T98K, and S65N; E17N, V31L, I33N, S65N, D71S, and V84K; E17N, A18D, E22K, V31L, I33N, D71E, and V84F; D13R, E17N, A18D, V31L, D71S, D83A, and V84K; E17N, V31L, D39G, D71S, D83A, and V84K; D13R, A18D, T26R, E52H, Y55F, Q70A, G80A, D83N, V84K, and Y85F; E17N, A18D, T26R, V31L, D71S, D83A, and V84K; E17N, V31L, I33N, D71S, G82R, and V84F; E17N, V31L, I33N, D71S, V84K, and T98K; V84K, T26R, D39G, D83E, D13R, and T98K; V84K, T26R, D83E, D13R, T98K, and S65N; E17N, V31L, I33N, V66Y, D71E, and V84F; E17N, A18D, V31L, I33N, D71E, and V84F; E17N, A18D, V31L, I33N, D71S, G80A, and V84F; A18D, T26R, E52H, Y55F, Q70A, G80A, D83N, V84K, Y85F, and F₈₈N; E17N, A18D, V31L, I33N, D71S, V84K, and T98K; E17N, A18D, V31L, I33N, S65N, D71S, and V84K; T26R, I33H, Y55F, Q70A, G80A, D83K, V84K, and F₈₈N; A18D, E22K, T26R, E52H, Y55F, Q70A, D71E, G80A, D83N, and V84K; or E17N, V31L, I33N, D71E, G82R, and V84F.

[0247] In some embodiments, a PKC comprises an amino acid substitution at one or more residues corresponding to one or more positions selected from the group consisting of position 13, 17, 18, 22, 26, 31, 33, 39, 52, 55, 64, 65, 66, 70, 71, 74, 80, 82, 83, 84, 85, 88, and/or 98 in SEQ ID NO: 1. In some embodiments, a PKC comprising a sequence with at least one amino acid substitution relative to SEQ ID NO: 1 and with at least 90% identity to SEQ ID NO: 62, 87, 220, 234, 219, 258, 231, 240, 255, 707, 749, 751, 765, 768, 790, 808, 810, 822, 828, 840, 846, 857, 862, 865, 921, 922, 858, 850, 851, 933, 871, 809, 926, 923, 924, 758, 747, 757, 875, 908, 823, 833, or 777.

[0248] In some embodiments, one or more amino acid substitutions relative to SEQ ID NO: 1 are selected from the group consisting of: A2G; V3M or V3Y; D13R or D13K; E17N; A18D or A18R; Q19E or Q19D; K20A; E21K; E22T or E22K; K25A or K25N; T26H, T26R, T26A, or T26E; V28A, V28S, V28E, or V28H; N29D, N29S, N29E, or N29T; V31L or V31A; I33H, I33R, I33D, 133E, I33K, I33Q, or 133N; M37L; K38L; D39G, D39S, or D39Q; Y41K or Y41R; D45I; N50K; E52H; E53H; Y55F; T56Y; H₅₇Y; E601 or E60L; T62M; E64Q or E64D; S65N; E67K; T68E, T68G, or T68H; Q70A or Q70L; D71Q or D71S; I74D, 174E, I74H, or I74Q; D83A or D83G; V84F, V84K, V84M, or V84Q; Y85A or Y85F; R86G; S87C, S87D, or S87K; F₈₈Y, F₈₈N, or F₈₈S; F₉₅M or F₉₅I; Y97F; T98E, T98K, or T98Y; R100A, R100G, R100K, R100N, R100Q, or R100S; and K101A or K101E.

[0249] In some embodiments, a PKC comprises one or more of the following amino acid substitutions relative to SEQ ID NO: 1: F₂₄M; V46F; Q48A; K49Q; N50F or N50W; V59I or V59F; V61T, V61D, or V61S; V66L, V66M, or V66Y; I69L or I69Y; D71E; 173L; I74S, I74G, or I74L; G80V, G80A, G80E, G80S, G80D, or G80N; F₈₁Y; G82K, G82V, or G82R; D83E, D83K, D83N, D83Q, D83R, or D83S; R86N or R86S; W89V or W89M; and/or I94V.

[0250] In some embodiments, a PKC comprises an amino acid deletion or substitution at a residue corresponding to position 2, 3, 13, 17, 18, 19, 20, 21, 22, 24, 25, 26, 28, 29, 31, 33, 37, 38, 39, 41, 45, 46, 48, 49, 50, 52, 53, 55, 56, 57, 59, 60, 61, 62, 64, 65, 66, 67, 68, 69, 70, 71, 73, 74, 80, 81, 82, 83, 84, 85, 86, 87, 88, 89, 94, 95, 97, 98, 100, and/or 101 in SEQ ID NO: 1. In some embodiments, a PKC comprises one, two, three, four, five, six, seven or more amino acid substitutions from Table 10. Without being bound by a particular theory, an amino acid deletion or substitution at a residue corresponding to position 2, 3, 13, 17, 18, 19, 20, 21, 22, 24, 25, 26, 28, 29, 31, 33, 37, 38, 39, 41, 45, 46, 48, 49, 50, 52, 53, 55, 56, 57, 59, 60, 61, 62, 64, 65, 66, 67, 68, 69, 70, 71, 73, 74, 80, 81, 82, 83, 84, 85, 86, 87, 88, 89, 94, 95, 97, 98, 100, and/or 101 in SEQ ID NO: 1 may increase protein abundance of the PKC and/or increase production of olivetolic acid by the PKC relative to a wild-type counterpart. In some embodiments, a PKC comprises: the amino acid G at a residue corresponding to position 2 in SEQ ID NO: 1 or a deletion of a residue corresponding to position 2 in SEQ ID NO: 1; the amino acid M or Y at a residue corresponding to position 3 in SEQ ID NO: 1; the amino acid R or K at a residue corresponding to position 13 in SEQ ID NO: 1; the amino acid N at a residue corresponding to position 17 in SEQ ID NO: 1; the amino acid D or R at a residue corresponding to position 18 in SEQ ID NO: 1; the amino acid E or D at a residue corresponding to position 19 in SEQ ID NO: 1; the amino acid A at a residue corresponding to position 20 in SEQ ID NO: 1; the amino acid K at a residue corresponding to position 21 in SEQ ID NO: 1; the amino acid T or K at a residue corresponding to position 22 in SEQ ID NO: 1; the amino acid M at a residue corresponding to position 24 in SEQ ID NO: 1; the amino acid A or N at a residue corresponding to position 25 in SEQ ID NO: 1; the amino acid H, R, A, or E at a residue corresponding to position 26 in SEQ ID NO: 1; the amino acid A, S, E, or H at a residue corresponding to position 28 in SEQ ID NO: 1; the amino acid D, S, E, or T at a residue corresponding to position 29 in SEQ ID NO: 1; the amino acid L or A at a residue corresponding to position 31 in SEQ ID NO: 1; the amino acid H, R, D, E, K, Q, or N at a residue corresponding to position 33 in SEQ ID NO: 1; the amino acid L at a residue corresponding to position 37 in SEQ ID NO: 1; the amino acid L at a residue corresponding to position 38 in SEQ ID NO: 1; the amino acid G, S, or Q at a residue corresponding to position 39 in SEQ ID NO: 1; the amino acid K or R at a residue corresponding to position 41 in SEQ ID NO: 1; the amino acid I at a residue corresponding to position 45 in SEQ ID NO: 1; the amino acid F at a residue corresponding to position 46 in SEQ ID NO: 1; the amino acid A at a residue corresponding to position 48 in SEQ ID NO: 1; the amino acid Q at a residue corresponding to position 49 in SEQ ID NO: 1; the amino acid K, F, or W at a residue corresponding to position 50 in SEQ ID NO: 1; the amino acid H at a residue corresponding to position 52 in SEQ ID NO: 1; the amino acid H at a residue corresponding to position 53 in SEQ ID NO: 1; the amino acid F at a residue corresponding to position 55 in SEQ ID NO: 1; the amino acid Y at a residue corresponding to position 56 in SEQ ID NO: 1; the amino acid Y at a residue corresponding to position 57 in SEQ ID NO: 1; the amino acid I or F at a residue corresponding to position 59 in SEQ ID NO: 1; the amino acid I or L at a residue corresponding to position 60 in SEQ ID NO: 1; the amino acid T, D, or S at a residue corresponding to position 61 in SEQ ID NO: 1; the amino acid M at a residue corresponding to position 62 in SEQ ID NO: 1; the amino acid Q or D at a residue corresponding to position 64 in SEQ ID NO: 1; the amino acid N at a residue corresponding to position 65 in SEQ ID NO: 1; the amino acid L, M, or Y at a residue corresponding to position 66 in SEQ ID NO: 1; the amino acid K at a residue corresponding to position 67 in SEQ ID NO: 1; the amino acid E, G, or H at a residue corresponding to position 68 in SEQ ID NO: 1; the amino acid L or Y at a residue corresponding to position 69 in SEQ ID NO: 1; the amino acid A or L at a residue corresponding to position 70 in SEQ ID NO: 1; the amino acid Q, S, or E at a residue corresponding to position 71 in SEQ ID NO: 1; the amino acid L at a residue corresponding to position 73 in SEQ ID NO: 1; the amino acid D, E, H, Q, S, G, or L at a residue corresponding to position 74 in SEQ ID NO: 1; the amino acid V, A, E, S, D, or N at a residue corresponding to position 80 in SEQ ID NO: 1; the amino acid Y at a residue corresponding to position 81 in SEQ ID NO: 1; the amino acid K, V, or R at a residue corresponding to position 82 in SEQ ID NO: 1; the amino acid A, E, G, K, N, Q, R, or S at a residue corresponding to position 83 in SEQ ID NO: 1; the amino acid F, K, M, or Q at a residue corresponding to position 84 in SEQ ID NO: 1; the amino acid A or F at a residue corresponding to position 85 in SEQ ID NO: 1; the amino acid N, G, or S at a residue corresponding to position 86 in SEQ ID NO: 1; the amino acid C, D, or K at a residue corresponding to position 87 in SEQ ID NO: 1; the amino acid Y, N, or S at a residue corresponding to position 88 in SEQ ID NO: 1; the amino acid V or M at a residue corresponding to position 89 in SEQ ID NO: 1; the amino acid V at a residue corresponding to position 94 in SEQ ID NO: 1; the amino acid M or I at a residue corresponding to position 95 in SEQ ID NO: 1; the amino acid F at a residue corresponding to position 97 in SEQ ID NO: 1; the amino acid E, K, or Y at a residue corresponding to position 98 in SEQ ID NO: 1; the amino acid A, G, K, N, Q, or S at a residue corresponding to position 100 in SEQ ID NO: 1; and/or the amino acid A or E at a residue corresponding to position 101 in SEQ ID NO: 1.

[0251] In some embodiments, the PKC comprises an amino acid deletion or substitution at one or more residues corresponding to position 2, 3, 13, 17, 18, 19, 20, 21, 22, 24, 25, 26, 28, 29, 31, 33, 37, 38, 39, 45, 46, 48, 49, 50, 52, 53, 55, 56, 57, 59, 60, 61, 62, 64, 65, 66, 67, 68, 70, 71, 74, 80, 82, 83, 84, 85, 86, 87, 88, 89, 94, 95, 97, 98, 100, and 101 in SEQ ID NO: 1. In some embodiments, the PKC comprises: the amino acid G at a residue corresponding to position 2 in SEQ ID NO: 1 or a deletion of a residue corresponding to position 2 in SEQ ID NO: 1; the amino acid Y at a residue corresponding to position 3 in SEQ ID NO: 1; the amino acid R or K at a residue corresponding to position 13 in SEQ ID NO: 1; the amino acid N at a residue corresponding to position 17 in SEQ ID NO: 1; the amino acid D or R at a residue corresponding to position 18 in SEQ ID NO: 1; the amino acid D at a residue corresponding to position 19 in SEQ ID NO: 1; the amino acid A at a residue corresponding to position 20 in SEQ ID NO: 1; the amino acid K at a residue corresponding to position 21 in SEQ ID NO: 1; the amino acid K at a residue corresponding to position 22 in SEQ ID NO: 1; the amino acid M at a residue corresponding to position 24 in SEQ ID NO: 1; the amino acid A or N at a residue corresponding to position 25 in SEQ ID NO: 1; the amino acid H, R, or A at a residue corresponding to position 26 in SEQ ID NO: 1; the amino acid E or H at a residue corresponding to position 28 in SEQ ID NO: 1; the amino acid S, E, or T at a residue corresponding to position 29 in SEQ ID NO: 1; the amino acid L at a residue corresponding to position 31 in SEQ ID NO: 1; the amino acid H, R, N at a residue corresponding to position 33 in SEQ ID NO: 1; the amino acid L at a residue corresponding to position 37 in SEQ ID NO: 1; the amino acid L at a residue corresponding to position 38 in SEQ ID NO: 1; the amino acid G or Q at a residue corresponding to position 39 in SEQ ID NO: 1; the amino acid I at a residue corresponding to position 45 in SEQ ID NO: 1; the amino acid F at a residue corresponding to position 46 in SEQ ID NO: 1; the amino acid A at a residue corresponding to position 48 in SEQ ID NO: 1; the amino acid Q at a residue corresponding to position 49 in SEQ ID NO: 1; the amino acid F, W, or K at a residue corresponding to position 50 in SEQ ID NO: 1; the amino acid H at a residue corresponding to position 52 in SEQ ID NO: 1; the amino acid H at a residue corresponding to position 53 in SEQ ID NO: 1; the amino acid F at a residue corresponding to position 55 in SEQ ID NO: 1; the amino acid Y at a residue corresponding to position 56 in SEQ ID NO: 1; the amino acid Y at a residue corresponding to position 57 in SEQ ID NO: 1; the amino acid F at a residue corresponding to position 59 in SEQ ID NO: 1; the amino acid I or L at a residue corresponding to position 60 in SEQ ID NO: 1; the amino acid D, S, or T at a residue corresponding to position 61 in SEQ ID NO: 1; the amino acid M at a residue corresponding to position 62 in SEQ ID NO: 1; the amino acid D at a residue corresponding to position 64 in SEQ ID NO: 1; the amino acid N at a residue corresponding to position 65 in SEQ ID NO: 1; the amino acid Y at a residue corresponding to position 66 in SEQ ID NO: 1; the amino acid K at a residue corresponding to position 67 in SEQ ID NO: 1; the amino acid G or H at a residue corresponding to position 68 in SEQ ID NO: 1; the amino acid A or L at a residue corresponding to position 70 in SEQ ID NO: 1; the amino acid Q, S, or E at a residue corresponding to position 71 in SEQ ID NO: 1; the amino acid G at a residue corresponding to position 74 in SEQ ID NO: 1; the amino acid V, A, D, or N at a residue corresponding to position 80 in SEQ ID NO: 1; the amino acid K or R at a residue corresponding to position 82 in SEQ ID NO: 1; the amino acid A, E, G, K, N, Q, R, or S at a residue corresponding to position 83 in SEQ ID NO: 1; the amino acid F or K at a residue corresponding to position 84 in SEQ ID NO: 1; the amino acid A or F at a residue corresponding to position 85 in SEQ ID NO: 1; the amino acid S at a residue corresponding to position 86 in SEQ ID NO: 1; the amino acid C or K at a residue corresponding to position 87 in SEQ ID NO: 1; the amino acid Y, N, or S at a residue corresponding to position 88 in SEQ ID NO: 1; the amino acid M at a residue corresponding to position 89 in SEQ ID NO: 1; the amino acid V at a residue corresponding to position 94 in SEQ ID NO: 1; the amino acid M or I at a residue corresponding to position 95 in SEQ ID NO: 1; the amino acid F at a residue corresponding to position 97 in SEQ ID NO: 1; the amino acid E, K, or Y at a residue corresponding to position 98 in SEQ ID NO: 1; the amino acid A, G, K, N, Q, or S at a residue corresponding to position 100 in SEQ ID NO: 1; and/or the amino acid A or E at a residue corresponding to position 101 in SEQ ID NO: 1.

[0252] In some embodiments, the PKC comprises an amino acid substitution at a residue corresponding to position 2, 3, 13, 17, 18, 19, 20, 21, 22, 25, 26, 28, 29, 31, 33, 37, 38, 39, 41, 45, 50, 52, 53, 55, 56, 57, 60, 62, 64, 65, 67, 68, 70, 71, 74, 83, 84, 85, 86, 87, 88, 95, 97, 98, 100, and/or 101 in SEQ ID NO: 1 wherein the PKC is capable of producing olivetolic acid from 3,5,7-trioxododecanoyl-CoA, and wherein, if present: the amino acid substitution at the residue corresponding to position 13 is D13R or D13K; the amino acid substitution at the residue corresponding to position 21 is E21K; the amino acid substitution at the residue corresponding to position 39 is D39G, D39S, or D39Q; the amino acid substitution at the residue corresponding to position 50 is N50K; the amino acid substitution at the residue corresponding to position 52 is E52H; the amino acid substitution at the residue corresponding to position 67 is E67K; the amino acid substitution at the residue corresponding to position 70 is Q70A or Q70L; the amino acid substitution at the residue corresponding to position 71 is D71Q or D71S; the amino acid substitution at the residue corresponding to position 74 is I74D, 174E, I74H, or I74Q; the amino acid substitution at the residue corresponding to position 83 is D83A or D83G; the amino acid substitution at the residue corresponding to position 86 is R86G; the amino acid substitution at the residue corresponding to position 87 is S87D or S87K; and the amino acid substitution at the residue corresponding to position 100 is R100A, R100G, R100K, R100N, R100Q, or R100S.

[0253] In some embodiments, the PKC comprises an amino acid substitution at a residue corresponding to position 2, 3, 13, 17, 18, 19, 20, 21, 22, 25, 26, 28, 29, 31, 33, 37, 38, 39, 45, 50, 52, 53, 55, 56, 57, 60, 62, 64, 65, 67, 68, 70, 71, 83, 84, 85, 87, 88, 95, 97, 98, 100, and/or 101 in SEQ ID NO: 1, and wherein, if present: the amino acid substitution at the residue corresponding to position 13 is D13R or D13K; the amino acid substitution at the residue corresponding to position 21 is E21K; the amino acid substitution at the residue corresponding to position 39 is D39G or D39Q; the amino acid substitution at the residue corresponding to position 50 is N50K; the amino acid substitution at the residue corresponding to position 52 is E52H; the amino acid substitution at the residue corresponding to position 67 is E67K; the amino acid substitution at the residue corresponding to position 70 is Q70A or Q70L; the amino acid substitution at the residue corresponding to position 71 is D71Q or D71S; the amino acid substitution at the residue corresponding to position 83 is D83A or D83G; the amino acid substitution at the residue corresponding to position 87 is S87K; and the amino acid substitution at the residue corresponding to position 100 is R100S.

[0254] In some embodiments, the PKC comprises: the amino acid G at a residue corresponding to position 2 in SEQ ID NO: 1; the amino acid M or Y at a residue corresponding to position 3 in SEQ ID NO: 1; the amino acid R or K at a residue corresponding to position 13 in SEQ ID NO: 1; the amino acid N at a residue corresponding to position 17 in SEQ ID NO: 1; the amino acid D or R at a residue corresponding to position 18 in SEQ ID NO: 1; the amino acid E or D at a residue corresponding to position 19 in SEQ ID NO: 1; the amino acid A at a residue corresponding to position 20 in SEQ ID NO: 1; the amino acid K at a residue corresponding to position 21 in SEQ ID NO: 1; the amino acid T or K at a residue corresponding to position 22 in SEQ ID NO: 1; the amino acid A or N at a residue corresponding to position 25 in SEQ ID NO: 1; the amino acid H, R, A, or E at a residue corresponding to position 26 in SEQ ID NO: 1; the amino acid A, S, E, or H at a residue corresponding to position 28 in SEQ ID NO: 1; the amino acid D, S, E, or T at a residue corresponding to position 29 in SEQ ID NO: 1; the amino acid L or A at a residue corresponding to position 31 in SEQ ID NO: 1; the amino acid H, R, D, E, K, Q, or N at a residue corresponding to position 33 in SEQ ID NO: 1; the amino acid L at a residue corresponding to position 37 in SEQ ID NO: 1; the amino acid L at a residue corresponding to position 38 in SEQ ID NO: 1; the amino acid G, S, or Q at a residue corresponding to position 39 in SEQ ID NO: 1; the amino acid K or R at a residue corresponding to position 41 in SEQ ID NO: 1; the amino acid I at a residue corresponding to position 45 in SEQ ID NO: 1; the amino acid K at a residue corresponding to position 50 in SEQ ID NO: 1; the amino acid H at a residue corresponding to position 52 in SEQ ID NO: 1; the amino acid H at a residue corresponding to position 53 in SEQ ID NO: 1; the amino acid F at a residue corresponding to position 55 in SEQ ID NO: 1; the amino acid Y at a residue corresponding to position 56 in SEQ ID NO: 1; the amino acid Y at a residue corresponding to position 57 in SEQ ID NO: 1; the amino acid I or L at a residue corresponding to position 60 in SEQ ID NO: 1; the amino acid M at a residue corresponding to position 62 in SEQ ID NO: 1; the amino acid Q or D at a residue corresponding to position 64 in SEQ ID NO: 1; the amino acid N at a residue corresponding to position 65 in SEQ ID NO: 1; the amino acid K at a residue corresponding to position 67 in SEQ ID NO: 1; the amino acid E, G, or H at a residue corresponding to position 68 in SEQ ID NO: 1; the amino acid A or L at a residue corresponding to position 70 in SEQ ID NO: 1; the amino acid Q or S, at a residue corresponding to position 71 in SEQ ID NO: 1; the amino acid D, E, H, or Q at a residue corresponding to position 74 in SEQ ID NO: 1; the amino acid A or G at a residue corresponding to position 83 in SEQ ID NO: 1; the amino acid F, K, M, or Q at a residue corresponding to position 84 in SEQ ID NO: 1; the amino acid A or F at a residue corresponding to position 85 in SEQ ID NO: 1; the amino acid G at a residue corresponding to position 86 in SEQ ID NO: 1; the amino acid D, or K at a residue corresponding to position 87 in SEQ ID NO: 1; the amino acid Y, N, or S at a residue corresponding to position 88 in SEQ ID NO: 1; the amino acid M or I at a residue corresponding to position 95 in SEQ ID NO: 1; the amino acid F at a residue corresponding to position 97 in SEQ ID NO: 1; the amino acid E, K, or Y at a residue corresponding to position 98 in SEQ ID NO: 1; the amino acid A, G, K, N, Q, or S at a residue corresponding to position 100 in SEQ ID NO: 1; and/or the amino acid A or E at a residue corresponding to position 101 in SEQ ID NO: 1.

[0255] In some embodiments, the PKC comprises: the amino acid M at a residue corresponding to position 24 in SEQ ID NO: 1; the amino acid F at a residue corresponding to position 46 in SEQ ID NO: 1; the amino acid A at a residue corresponding to position 48 in SEQ ID NO: 1; the amino acid Q at a residue corresponding to position 49 in SEQ ID NO: 1; the amino acid I or F at a residue corresponding to position 59 in SEQ ID NO: 1; the amino acid T, D, or S at a residue corresponding to position 61 in SEQ ID NO: 1; the amino acid L, M, or Y at a residue corresponding to position 66 in SEQ ID NO: 1; the amino acid L or Y at a residue corresponding to position 69 in SEQ ID NO: 1; the amino acid L at a residue corresponding to position 73 in SEQ ID NO: 1; 34.the amino acid S at a residue corresponding to position 74 in SEQ ID NO: 1; the amino acid V, A, E, S, D, or N at a residue corresponding to position 80 in SEQ ID NO: 1; the amino acid Y at a residue corresponding to position 81 in SEQ ID NO: 1; the amino acid K, V, or R at a residue corresponding to position 82 in SEQ ID NO: 1; the amino acid V or M at a residue corresponding to position 89 in SEQ ID NO: 1; and/or the amino acid V at a residue corresponding to position 94 in SEQ ID NO: 1.

[0256] A PKC may comprise one or more amino acid substitutions, deletions, and/or insertions in domain(s) corresponding to any of the domains set forth in Table 2. For example, a PKC may comprise one or more amino acid substitutions, deletions, and/or insertions in a domain corresponding to beta sheet 1 (positions 1-11 in SEQ ID NO:1); loop 1 (positions 12-16 in SEQ ID NO:1); helix 1 (positions 17-29 in SEQ ID NO:1); loop 2 (positions 33-38 in SEQ ID NO:1); loop 3 (positions 45-56 in SEQ ID NO:1); beta sheet 3 (positions 57-62 in SEQ ID NO:1); helix 2 (positions 66-73 in SEQ ID NO:1); helix 3 (positions 76-85 in SEQ ID NO:1); 310 helix 2 (positions 86-88 in SEQ ID NO: 1). In some embodiments, a PKC comprises one or more amino acid substitutions, deletions, and/or insertions in a domain corresponding to beta sheet 1 (positions 1-11 in SEQ ID NO: 1); loop 1 (positions 12-16 in SEQ ID NO: 1); helix 1 (positions 17-29 in SEQ ID NO: 1); 310 helix 1 (positions 30-32 in SEQ ID NO: 1); loop 2 (positions 33-38 in SEQ ID NO: 1); beta sheet 2 (positions 39-44 in SEQ ID NO: 1); loop 3 (positions 45-56 in SEQ ID NO: 1); beta sheet 3 (positions 57-62 in SEQ ID NO: 1); loop 4 (positions 63-65 in SEQ ID NO: 1); helix 2 (positions 66-73 in SEQ ID NO: 1); turn 1 (positions 74-75 in SEQ ID NO: 1); helix 3 (positions 76-85 in SEQ ID NO: 1); 310 helix 2 (positions 86-88 in SEQ ID NO: 1); and/or beta sheet 4 (positions 89-97 in SEQ ID NO: 1). In some embodiments, one or more amino acid substitutions are located in a domain corresponding to: helix 1 (positions 17-29 in SEQ ID NO: 1); loop 3 (positions 45-56 in SEQ ID NO: 1); helix 2 (positions 66-73 in SEQ ID NO: 1); and/or helix 3 (positions 76-85 in SEQ ID NO: 1).

[0257] In some embodiments, a PKC comprises one or more amino acid substitutions or deletions located in a domain corresponding to: beta sheet 1 (positions 1-11 in SEQ ID NO: 1); loop 1 (positions 12-16 in SEQ ID NO: 1); helix 1 (positions 17-29 in SEQ ID NO: 1); 310 helix 1 (positions 30-32 in SEQ ID NO: 1); loop 2 (positions 33-38 in SEQ ID NO: 1); beta sheet 2 (positions 39-44 in SEQ ID NO: 1); loop 3 (positions 45-56 in SEQ ID NO: 1); beta sheet 3 (positions 57-62 in SEQ ID NO: 1); loop 4 (positions 63-65 in SEQ ID NO: 1); helix 2 (positions 66-73 in SEQ ID NO: 1); turn 1 (positions 74-75 in SEQ ID NO: 1); helix 3 (positions 76-85 in SEQ ID NO: 1); 310 helix 2 (positions 86-88 in SEQ ID NO: 1); beta sheet 4 (positions 89-97 in SEQ ID NO: 1); and/or loop 5 (positions 98-101 in SEQ ID NO: 1).

[0258] In some embodiments, a PKC comprises one or more amino acid substitutions at a residue in domain(s) corresponding to helix 2 (positions 66-73 in SEQ ID NO:1); turn 1 (positions 74-75 in SEQ ID NO:1); helix 3 (positions 76-85 in SEQ ID NO:1); 310 helix 2 (positions 86-88 in SEQ ID NO:1); and/or beta sheet 4 (positions 89-97 in SEQ ID NO:1). In some embodiments, a PKC comprises one or more amino acid substitutions at a residue corresponding to position 73, 74, 80, 82, 84, 86, 87, 88, and/or 89 in SEQ ID NO: 1. Without being bound by a particular theory, residues corresponding to position 73, 74, 80, 82, 84, 86, 87, 88, and/or 89 in SEQ ID NO: 1 may affect the expression and/or catalytic activity of a PKC because these residues are near or are in the substrate/product binding pocket of a PKC. Many of these positions are near turn 1 (positions 74 and 75), which forms a kink that separates helix 2 and helix 3. As can be observed from FIG. 7A and Table 2, above, the kink between helices 2 and 3 shapes the binding pocket and catalytic sites around the substrate. Without being bound by a particular theory, modification of a PKC at or near a helix kink may affect the catalytic function of a PKC, for example, by changing the shape of the binding pocket to better conform to the substrate, thereby enhancing the catalytic parameters (K_{M} and/or k_{cat}) of the PKC. As used herein, a “binding pocket” comprises the residues in an enzyme that directly contact the substrate and/or product. In some embodiments, one or more (e.g. at least 2, at least 3, at least 4, amino acid substitutions increase the stability of a kinked helix and/or improve conformation of a binding pocket of a PKC to the compound of Formula 4a and/or the compound of Formula 6a. In some embodiments, the kinked helix is defined by the domains corresponding to helix 2 (positions 66-73 in SEQ ID NO: 1), turn 1 (positions 74-75 in SEQ ID NO: 1), and helix 3 (positions 76-85 in SEQ ID NO: 1). In some embodiments, the kinked helix corresponds to positions 66-85 of SEQ ID NO: 1. In some embodiments, improving the conformation of a binding pocket of a PKC to a substrate increases the binding affinity of the PKC for the substrate. In some embodiments, improving the conformation of a binding pocket of a PKC to a substrate and/or product, increases the turnover number of the PKC.

[0259] In some embodiments, a PKC comprises one or more amino acid substitutions located in a domain corresponding to: loop 3 (positions 45-56 in SEQ ID NO: 1); helix 2 (positions 66-73 in SEQ ID NO: 1); and helix 3 (positions 76-85 in SEQ ID NO: 1). In some embodiments, a PKC comprises at least two amino acid substitutions in a domain corresponding to helix 3 (positions 76-85 in SEQ ID NO: 1). In some embodiments, a PKC comprises at least 6 amino acid substitutions or deletions relative to SEQ ID NO: 1, wherein the PKC comprises at least two amino acid substitutions in a domain corresponding to helix 3 (positions 76-85 in SEQ ID NO: 1), and wherein the PKC is capable of producing olivetolic acid from 3,5,7-trioxododecanoyl-CoA. In some embodiments, a PKC comprises at least two amino acid substitutions in a domain corresponding to helix 3 (positions 76-85 in SEQ ID NO: 1), wherein the at least two amino acid includes an amino acid substitution at position 84 relative to SEQ ID NO: 1. In some embodiments, the at least two amino acid substitutions in the domain corresponding to helix 3 (positions 76-85 in SEQ ID NO: 1) are at residues corresponding to positions 80 and 82 in SEQ ID NO: 1. In some embodiments, the PKC comprises: the amino acid E, A, or S at the residue corresponding to position 80 in SEQ ID NO: 1; and/or the amino acid V or K at the residue corresponding to position 82 in SEQ ID NO: 1. In some embodiments, the PKC comprises an amino acid substitution at a residue corresponding to position 73 or 74 in SEQ ID NO: 1. In some embodiments, the PKC comprises the amino acid L at the residue corresponding to position 73 in SEQ ID NO: 1; and/or the PKC comprises the amino acid S or L at the residue corresponding to position 74 in SEQ ID NO: 1. In some embodiments, the PKC comprises an amino acid substitution at a residue corresponding to position 84 and/or 86-89. In some embodiments, the PKC comprises: the amino acid M at the residue corresponding to position 84 in SEQ ID NO: 1; the amino acid G at the residue corresponding to position 86 in SEQ ID NO: 1; the amino acid D at the residue corresponding to position 87 in SEQ ID NO: 1; the amino acid Y at the residue corresponding to position 88 in SEQ ID NO: 1; and/or the amino acid V at the residue corresponding to position 89 in SEQ ID NO: 1.

[0260] In some embodiments, relative to SEQ ID NO: 1, a PKC comprises I73L, and/or G80E, G80A, or G80S, and/or G82V or G82K. In some embodiments, relative to SEQ ID NO: 1, a PKC comprises I74S or I74L and/or G80E and/or G82V or G82K. Without being bound by a particular theory, amino acid substitutions at residues corresponding to position 80 and position 82 in SEQ ID NO: 1 may increase the expression of a particular PKC relative to a wild-type PKC. In some embodiments, relative to SEQ ID NO: 1, a PKC further comprises W89V, F₈₈Y, S87D, R86G, and/or V84M.

[0261] Without being bound by a particular theory, a kink that separates helices is generally expected to be energetically unfavorable unless the kink is stabilized by surrounding amino acids. In some embodiments, an amino acid substitution disclosed in this application either alone or in combination with another amino acid substitution may stabilize a kink between two helices. In some embodiments, an amino acid substitution disclosed in this application either alone or in combination with another amino acid substitution may promote the folding of the kink and stabilize the kink. In some embodiments, amino acid substitutions including: I73L; one of G80E, G80A, or G80S; and one of G82V or G82K, relative to SEQ ID NO: 1, increase the stability or relieve the constraint of the kink between helices 2 and 3 in a PKC. In some embodiments, amino acid substitutions including: one of 174S or I74L; G80E; and one of G82V or G82K, relative to SEQ ID NO: 1, increase the stability or relieve the constraint of the kink between helices 2 and 3 in a PKC.

[0262] In some embodiments, a PKC comprises an amino acid substitution at a residue corresponding to position 26, 73, and/or 80 in SEQ ID NO: 1. In some embodiments, relative to SEQ ID NO: 1, a PKC comprises T26A, I73L, and/or G80A.

[0263] In some embodiments, relative to SEQ ID NO: 1, a PKC comprises one or more amino acid substitutions or deletions from Tables 4-8, 9A-9B, and/or 10. In some embodiments, a PKC comprises one or more amino acid substitutions at one or more positions corresponding to one or more positions selected from: position 17, 18, 29, 31, 33, 39, 71, 83, and/or 84 in SEQ ID NO: 1. In some embodiments, a PKC is capable of producing olivetolic acid from 3,5,7-trioxododecanoyl-CoA. In some embodiments, a PKC comprises one or more of the following amino acid substitutions: E17N, A18D, N29T, V31L, I33N, D39Q, D71S, D83A, and/or V84F relative to SEQ ID NO: 1. In some embodiments, the PKC comprises: a) E17N, A18D, V31L, D39Q, D71S, and D83A relative to SEQ ID NO: 1; b) E17N, A18D, V31L, D71S, D83A, and V84F relative to SEQ ID NO: 1; or c) A18D, V31L, D39Q, D71S, D83A, and V84F relative to SEQ ID NO: 1. See also, e.g., amino acid substitutions in Table 7.

[0264] In some embodiments, a PKC comprises an amino acid substitutions at one or more positions corresponding to one or more positions selected from: position 13, 18, 22, 26, 29, 33, 39, 49, 52, 55, 70, 71, 74, 80, 83, 84, and/or 85 in SEQ ID NO: 1. In some embodiments, the PKC comprises amino acid substitutions relative to SEQ ID NO: 1 selected from the group consisting of: D13R; A18D; E22K; T26R or T26H; N29S; 133R or 133H; D39G; K49Q; E52H; Y55F; Q70A or Q70L; D71Q; I74G; G80A; D83K or D83N; V84K; and Y85A. In some embodiments, relative to SEQ ID NO: 1, the PKC comprises: I33R, E52H, Y55F, Q70A, G80A, D83K, and V84K; D13R, A18D, N29S, Q70L, D71Q, G80A, and D83K; I33R, E52H, Y55F, Q70A, I74G, and D83K; T26R, I33H, E52H, Y55F, Q70A, and D83K; A18D, T26R, E52H, Y55F, Q70A, G80A, D83N, V84K, and Y85A; T26R, I33H, Y55F, Q70A, G80A, D83K, and Y85A; or E22K, T26H, N29S, D39G, K49Q, E52H, D83N, and V84K. See also, e.g., Table 8.

[0265] In some embodiments, the production of a PKC of interest by a host cell may be assessed as production relative to a control host cell. As a non-limiting example, the level of mRNA and/or protein level of a PKC relative may be assessed relative to the level of mRNA and/or protein level of a control PKC. In some embodiments, a control host cell does not comprise the PKC of interest. In some embodiments, a control host cell does not comprise a heterologous polynucleotide encoding a PKC. In some embodiments, the control host cell comprises a PKC that is different from the PKC of interest. In some embodiments, the control host cell comprises a wild-type PKC.

[0266] In some embodiments, a host cell produces at least 10%, at least 20%, at least 30%, at least 40%, at least 50%, at least 60%, at least 70%, at least 80%, at least 90%, at least 100%, at least 110%, at least 120%, at least 130%, at least 140%, at least 150%, at least 160%, at least 170%, at least 180%, at least 190%, at least 200%, at least 210%, at least 220%, at least 230%, at least 240%, at least 250%, at least 260%, at least 270%, at least 280%, at least 290%, at least 300%, at least 310%, at least 320%, at least 330%, at least 340%, at least 350%, at least 360%, at least 370%, at least 380%, at least 390%, at least 400%, at least 410%, at least 420%, at least 430%, at least 440%, at least 450%, at least 460%, at least 470%, at least 480%, at least 490%, at least 500%, at least 510%, at least 520%, at least 530%, at least 540%, at least 550%, at least 560%, at least 570%, at least 580%, at least 590%, at least 600%, at least 610%, at least 620%, at least 630%, at least 640%, at least 650%, at least 660%, at least 670%, at least 680%, at least 690%, at least 700%, at least 710%, at least 720%, at least 730%, at least 740%, at least 750%, at least 760%, at least 770%, at least 780%, at least 790%, at least 800%, at least 810%, at least 820%, at least 830%, at least 840%, at least 850%, at least 860%, at least 870%, at least 880%, at least 890%, at least 900%, at least 910%, at least 920%, at least 930%, at least 940%, at least 950%, at least 960%, at least 970%, at least 980%, at least 990%, or at least 1,000%, including all values in between, of a PKC relative to a control host cell.

[0267] In some embodiments, a host cell that comprises a heterologous polynucleotide encoding a PKC described in this application produces increased levels of the PKC relative to a control host cell. As a non-limiting example, one or more amino acid substitutions, insertions, and/or deletions may increase the level of mRNA and/or protein level of a PKC relative to a control PKC. In some embodiments, a host cell produces at least 10%, at least 20%, at least 30%, at least 40%, at least 50%, at least 60%, at least 70%, at least 80%, at least 90%, at least 100%, at least 110%, at least 120%, at least 130%, at least 140%, at least 150%, at least 160%, at least 170%, at least 180%, at least 190%, at least 200%, at least 210%, at least 220%, at least 230%, at least 240%, at least 250%, at least 260%, at least 270%, at least 280%, at least 290%, at least 300%, at least 310%, at least 320%, at least 330%, at least 340%, at least 350%, at least 360%, at least 370%, at least 380%, at least 390%, at least 400%, at least 410%, at least 420%, at least 430%, at least 440%, at least 450%, at least 460%, at least 470%, at least 480%, at least 490%, at least 500%, at least 510%, at least 520%, at least 530%, at least 540%, at least 550%, at least 560%, at least 570%, at least 580%, at least 590%, at least 600%, at least 610%, at least 620%, at least 630%, at least 640%, at least 650%, at least 660%, at least 670%, at least 680%, at least 690%, at least 700%, at least 710%, at least 720%, at least 730%, at least 740%, at least 750%, at least 760%, at least 770%, at least 780%, at least 790%, at least 800%, at least 810%, at least 820%, at least 830%, at least 840%, at least 850%, at least 860%, at least 870%, at least 880%, at least 890%, at least 900%, at least 910%, at least 920%, at least 930%, at least 940%, at least 950%, at least 960%, at least 970%, at least 980%, at least 990%, or at least 1,000%, including all values in between, more of a PKC relative to a control host cell.

[0268] In some embodiments, a PKC comprises one or more amino acid substitutions, insertions, and/or deletions that increase expression of the PKC relative to a control PKC. In some embodiments, a PKC comprises one or more amino acid substitutions, insertions, and/or deletions that increase production of a product relative to a control PKC. In some embodiments, a PKC comprises one or more amino acid substitutions, insertions, and/or deletions that increase expression of the PKC and increases of a product relative to a control PKC.

[0269] In some embodiments, a PKC catalyzes the formation of a compound which occurs in the presence of a PKS. In some embodiments, a PKC substrate is a tetraketide. PKC substrates include trioxoalkanoyl-CoAs, such as 3,5,7-Trioxododecanoyl-CoA, or a compound of Formula (4):

[chemical structure]

[0270] wherein R is hydrogen, optionally substituted acyl, optionally substituted alkyl, optionally substituted alkenyl, optionally substituted alkynyl, optionally substituted carbocyclyl, or optionally substituted aryl. In certain embodiments, a PKC catalyzes a compound of Formula (4):

[chemical structure]

[0271] wherein R is hydrogen, optionally substituted acyl, optionally substituted alkyl, optionally substituted alkenyl, optionally substituted alkynyl, optionally substituted carbocyclyl, or optionally substituted aryl; to form a compound of Formula (6):

[chemical structure]

[0272] wherein R is hydrogen, optionally substituted acyl, optionally substituted alkyl, optionally substituted alkenyl, optionally substituted alkynyl, optionally substituted carbocyclyl, or optionally substituted aryl; as substrates. R is as defined in this application. In some embodiments, R is a C2-C8 optionally substituted alkyl. In some embodiments, R is a C2-C6 optionally substituted alkyl. In some embodiments, R is a propyl or pentyl. In some embodiments, R is pentyl. In some embodiments, R is propyl.

[0273] Any of the enzymes, host cells, and methods described in this application may be used for the production of cannabinoids and cannabinoid precursors, such as those provided in Table 1. In general, the term “production” is used to refer to the generation of one or more products (e.g., products of interest and/or by-products/off-products), for example, from a particular substrate or reactant. The amount of production may be evaluated at any one or more steps of a pathway, such as a final product or an intermediate product, using metrics familiar to one of ordinary skill in the art. For example, the amount of production may be assessed for a single enzymatic reaction (e.g., conversion of a compound of Formula (4) to a compound of Formula (6) by a PKC). Alternatively or in addition, the amount of production may be assessed for a series of enzymatic reactions (e.g., the biosynthetic pathway shown in FIG. 1 and/or FIG. 2). Production may be assessed by any metrics known in the art, for example, by assessing volumetric productivity, enzyme kinetics/reaction rate, specific productivity biomass-specific productivity, titer, yield, and total titer of one or more products (e.g., products of interest and/or by-products/off-products).

[0274] In some embodiments, the metric used to measure production may depend on whether a continuous process is being monitored (e.g., several cannabinoid biosynthesis steps are used in combination) or whether a particular end product is being measured. For example, in some embodiments, metrics used to monitor production by a continuous process may include volumetric productivity, enzyme kinetics and reaction rate. In some embodiments, metrics used to monitor production of a particular product may include specific productivity biomass-specific productivity, titer, yield, and total titer of one or more products (e.g., products of interest and/or by-products/off-products).

[0275] Production of one or more products (e.g., products of interest and/or by-products/off-products) may be assessed indirectly, for example by determining the amount of a substrate remaining following termination of the reaction/fermentation. For example, for a PKC that catalyzes the formation of products (e.g., a compound of Formula (6), including olivetolic acid (Formula (6a)) from a compound of Formula (4), including 3,5,7-trioxododecanoyl-CoA (Formula (4a)), production of the products may be assessed by quantifying the compound of Formula (6) directly or by quantifying the amount of substrate remaining following the reaction (e.g., amount of the compound of Formula (4)).

[0276] In some embodiments, the production of a product (e.g., products of interest and/or by-products/off-products) may be assessed as production relative to a control. In some embodiments, the production of a compound of Formula (6) by a particular PKC may be assessed relative to a control. In some embodiments, the production of CBGA by a particular PKC in a host cell may be assessed relative to a PKC in another host cell. In some embodiments, the production of a compound of Formula (6) from a particular substrate may be assessed relative to a control using a different substrate.

[0277] In some embodiments, a PKC may be capable of producing at least 1% (e.g., at least 5%, at least 10%, at least 15%, at least 20%, at least 25%, at least 30%, at least 35%, at least 40%, at least 45%, at least 50%, at least 55%, at least 60%, at least 65%, at least 70%, at least 75%, at least 80%, at least 85%, at least 90%, at least 95%, at least 100%, at least 125%, at least 150%, at least 175%, at least 200%, at least 300%, at least 400%, at least 500%, at least 600%, at least 700%, at least 800%, at least 900%, or at least 1,000%) the amount of one or more compounds of Formula (6) relative to a control. In some embodiments, the compound of Formula (6) is olivetolic acid (Formula (6a)).

[0278] In some embodiments, a PKC may be capable of producing a product at a higher titer or yield relative to a control. In some embodiments, a PKC may be capable of producing a product at a faster rate (e.g., higher productivity) relative to a control. In some embodiments, a PKC may have preferential binding and/or activity towards one substrate relative to another substrate. In some embodiments, a PKC may preferentially produce one product relative to another product.

[0279] In some embodiments, a PKC may produce at least 0.0001 μg/L, at least 0.001 μg/L, at least 0.01 μg/L, at least 0.02 μg/L, at least 0.03 μg/L, at least 0.04 μg/L, at least 0.05 μg/L, at least 0.06 μg/L, at least 0.07 μg/L, at least 0.08 μg/L, at least 0.09 μg/L, at least 0.1 μg/L, at least 0.11 μg/L, at least 0.12 μg/L, at least 0.13 μg/L, at least 0.14 μg/L, at least 0.15 μg/L, at least 0.16 μg/L, at least 0.17 μg/L, at least 0.18 μg/L, at least 0.19 μg/L, at least 0.2 μg/L, at least 0.21 μg/L, at least 0.22 μg/L, at least 0.23 μg/L, at least 0.24 μg/L, at least 0.25 μg/L, at least 0.26 μg/L, at least 0.27 μg/L, at least 0.28 μg/L, at least 0.29 μg/L, at least 0.3 μg/L, at least 0.31 μg/L, at least 0.32 μg/L, at least 0.33 μg/L, at least 0.34 μg/L, at least 0.35 μg/L, at least 0.36 μg/L, at least 0.37 μg/L, at least 0.38 μg/L, at least 0.39 μg/L, at least 0.4 μg/L, at least 0.41 μg/L, at least 0.42 μg/L, at least 0.43 μg/L, at least 0.44 μg/L, at least 0.45 μg/L, at least 0.46 μg/L, at least 0.47 μg/L, at least 0.48 μg/L, at least 0.49 μg/L, at least 0.5 μg/L, at least 0.51 μg/L, at least 0.52 μg/L, at least 0.53 μg/L, at least 0.54 μg/L, at least 0.55 μg/L, at least 0.56 μg/L, at least 0.57 μg/L, at least 0.58 μg/L, at least 0.59 μg/L, at least 0.6 μg/L, at least 0.61 μg/L, at least 0.62 μg/L, at least 0.63 μg/L, at least 0.64 μg/L, at least 0.65 μg/L, at least 0.66 μg/L, at least 0.67 μg/L, at least 0.68 μg/L, at least 0.69 μg/L, at least 0.7 μg/L, at least 0.71 μg/L, at least 0.72 μg/L, at least 0.73 μg/L, at least 0.74 μg/L, at least 0.75 μg/L, at least 0.76 μg/L, at least 0.77 μg/L, at least 0.78 μg/L, at least 0.79 μg/L, at least 0.8 μg/L, at least 0.81 μg/L, at least 0.82 μg/L, at least 0.83 μg/L, at least 0.84 μg/L, at least 0.85 μg/L, at least 0.86 μg/L, at least 0.87 μg/L, at least 0.88 μg/L, at least 0.89 μg/L, at least 0.9 μg/L, at least 0.91 μg/L, at least 0.92 μg/L, at least 0.93 μg/L, at least 0.94 μg/L, at least 0.95 μg/L, at least 0.96 μg/L, at least 0.97 μg/L, at least 0.98 μg/L, at least 0.99 μg/L, at least 1 μg/L, at least 1.1 μg/L, at least 1.2 μg/L, at least 1.3 μg/L, at least 1.4 μg/L, at least 1.5 μg/L, at least 1.6 μg/L, at least 1.7 μg/L, at least 1.8 μg/L, at least 1.9 μg/L, at least 2 μg/L, at least 2.1 μg/L, at least 2.2 μg/L, at least 2.3 μg/L, at least 2.4 μg/L, at least 2.5 μg/L, at least 2.6 μg/L, at least 2.7 μg/L, at least 2.8 μg/L, at least 2.9 μg/L, at least 3 μg/L, at least 3.1 μg/L, at least 3.2 μg/L, at least 3.3 μg/L, at least 3.4 μg/L, at least 3.5 μg/L, at least 3.6 μg/L, at least 3.7 μg/L, at least 3.8 μg/L, at least 3.9 μg/L, at least 4 μg/L, at least 4.1 μg/L, at least 4.2 μg/L, at least 4.3 μg/L, at least 4.4 μg/L, at least 4.5 μg/L, at least 4.6 μg/L, at least 4.7 μg/L, at least 4.8 μg/L, at least 4.9 μg/L, at least 5 μg/L, at least 5.1 μg/L, at least 5.2 μg/L, at least 5.3 μg/L, at least 5.4 μg/L, at least 5.5 μg/L, at least 5.6 μg/L, at least 5.7 μg/L, at least 5.8 μg/L, at least 5.9 μg/L, at least 6 μg/L, at least 6.1 μg/L, at least 6.2 μg/L, at least 6.3 μg/L, at least 6.4 μg/L, at least 6.5 μg/L, at least 6.6 μg/L, at least 6.7 μg/L, at least 6.8 μg/L, at least 6.9 μg/L, at least 7 μg/L, at least 7.1 μg/L, at least 7.2 μg/L, at least 7.3 μg/L, at least 7.4 μg/L, at least 7.5 μg/L, at least 7.6 μg/L, at least 7.7 μg/L, at least 7.8 μg/L, at least 7.9 μg/L, at least 8 μg/L, at least 8.1 μg/L, at least 8.2 μg/L, at least 8.3 μg/L, at least 8.4 μg/L, at least 8.5 μg/L, at least 8.6 μg/L, at least 8.7 μg/L, at least 8.8 μg/L, at least 8.9 μg/L, at least 9 μg/L, at least 9.1 μg/L, at least 9.2 μg/L, at least 9.3 μg/L, at least 9.4 μg/L, at least 9.5 μg/L, at least 9.6 μg/L, at least 9.7 μg/L, at least 9.8 μg/L, at least 9.9 μg/L, at least 10 μg/L, at least 10.1 μg/L, at least 10.2 μg/L, at least 10.3 μg/L, at least 10.4 μg/L, at least 10.5 μg/L, at least 10.6 μg/L, at least 10.7 μg/L, at least 10.8 μg/L, at least 10.9 μg/L, at least 11 μg/L, at least 11.1 μg/L, at least 11.2 μg/L, at least 11.3 μg/L, at least 11.4 μg/L, at least 11.5 μg/L, at least 11.6 μg/L, at least 11.7 μg/L, at least 11.8 μg/L, at least 11.9 μg/L, at least 12 μg/L, at least 12.1 μg/L, at least 12.2 μg/L, at least 12.3 μg/L, at least 12.4 μg/L, at least 12.5 μg/L, at least 12.6 μg/L, at least 12.7 μg/L, at least 12.8 μg/L, at least 12.9 μg/L, at least 13 μg/L, at least 13.1 μg/L, at least 13.2 μg/L, at least 13.3 μg/L, at least 13.4 μg/L, at least 13.5 μg/L, at least 13.6 μg/L, at least 13.7 μg/L, at least 13.8 μg/L, at least 13.9 μg/L, at least 14 μg/L, at least 14.1 μg/L, at least 14.2 μg/L, at least 14.3 μg/L, at least 14.4 μg/L, at least 14.5 μg/L, at least 14.6 μg/L, at least 14.7 μg/L, at least 14.8 μg/L, at least 14.9 μg/L, at least 15 μg/L, at least 15.1 μg/L, at least 15.2 μg/L, at least 15.3 μg/L, at least 15.4 μg/L, at least 15.5 μg/L, at least 15.6 μg/L, at least 15.7 μg/L, at least 15.8 μg/L, at least 15.9 μg/L, at least 16 μg/L, at least 16.1 μg/L, at least 16.2 μg/L, at least 16.3 μg/L, at least 16.4 μg/L, at least 16.5 μg/L, at least 16.6 μg/L, at least 16.7 μg/L, at least 16.8 μg/L, at least 16.9 μg/L, at least 17 μg/L, at least 17.1 μg/L, at least 17.2 μg/L, at least 17.3 μg/L, at least 17.4 μg/L, at least 17.5 μg/L, at least 17.6 μg/L, at least 17.7 μg/L, at least 17.8 μg/L, at least 17.9 μg/L, at least 18 μg/L, at least 18.1 μg/L, at least 18.2 μg/L, at least 18.3 μg/L, at least 18.4 μg/L, at least 18.5 μg/L, at least 18.6 μg/L, at least 18.7 μg/L, at least 18.8 μg/L, at least 18.9 μg/L, at least 19 μg/L, at least 19.1 μg/L, at least 19.2 μg/L, at least 19.3 μg/L, at least 19.4 μg/L, at least 19.5 μg/L, at least 19.6 μg/L, at least 19.7 μg/L, at least 19.8 μg/L, at least 19.9 μg/L, at least 20 μg/L, at least 25 μg/L, at least 30 μg/L, at least 35 μg/L, at least 40 μg/L, at least 45 μg/L, at least 50 μg/L, at least 55 μg/L, at least 60 μg/L, at least 65 μg/L, at least 70 μg/L, at least 75 μg/L, at least 80 μg/L, at least 85 μg/L, at least 90 μg/L, at least 95 μg/L, at least 100 μg/L, at least 105 μg/L, at least 110 μg/L, at least 115 μg/L, at least 120 μg/L, at least 125 μg/L, at least 130 μg/L, at least 135 μg/L, at least 140 μg/L, at least 145 μg/L, at least 150 μg/L, at least 155 μg/L, at least 160 μg/L, at least 165 μg/L, at least 170 μg/L, at least 175 μg/L, at least 180 μg/L, at least 185 μg/L, at least 190 μg/L, at least 195 μg/L, at least 200 μg/L, at least 205 μg/L, at least 210 μg/L, at least 215 μg/L, at least 220 μg/L, at least 225 μg/L, at least 230 μg/L, at least 235 μg/L, at least 240 μg/L, at least 245 μg/L, at least 250 μg/L, at least 255 μg/L, at least 260 μg/L, at least 265 μg/L, at least 270 μg/L, at least 275 μg/L, at least 280 μg/L, at least 285 μg/L, at least 290 μg/L, at least 295 μg/L, at least 300 μg/L, at least 305 μg/L, at least 310 μg/L, at least 315 μg/L, at least 320 μg/L, at least 325 μg/L, at least 330 μg/L, at least 335 μg/L, at least 340 μg/L, at least 345 μg/L, at least 350 μg/L, at least 355 μg/L, at least 360 μg/L, at least 365 μg/L, at least 370 μg/L, at least 375 μg/L, at least 380 μg/L, at least 385 μg/L, at least 390 μg/L, at least 395 μg/L, at least 400 μg/L, at least 405 μg/L, at least 410 μg/L, at least 415 μg/L, at least 420 μg/L, at least 425 μg/L, at least 430 μg/L, at least 435 μg/L, at least 440 μg/L, at least 445 μg/L, at least 450 μg/L, at least 455 μg/L, at least 460 μg/L, at least 465 μg/L, at least 470 μg/L, at least 475 μg/L, at least 480 μg/L, at least 485 μg/L, at least 490 μg/L, at least 495 μg/L, at least 500 μg/L, at least 600 μg/L, at least 700 μg/L, at least 800 μg/L, at least 900 μg/L, at least 1,000 μg/L, at least 2,000 μg/L, at least 3,000 μg/L, at least 4,000 μg/L, at least 5,000 μg/L, at least 6,000 μg/L, at least 7,000 μg/L, at least 8,000 μg/L, at least 9,000 μg/L, at least 10,000 μg/L, at least 11,000 μg/L, at least 12,000 μg/L, at least 13,000 μg/L, at least 14,000 μg/L, at least 15,000 μg/L, at least 16,000 μg/L, at least 17,000 μg/L, at least 18,000 μg/L, at least 19,000 μg/L, at least 20,000 μg/L, at least 21,000 μg/L, at least 22,000 μg/L, at least 23,000 μg/L, at least 24,000 μg/L, at least 25,000 μg/L, at least 26,000 μg/L, at least 27,000 μg/L, at least 28,000 μg/L, at least 29,000 μg/L, at least 30,000 μg/L, at least 31,000 μg/L, at least 32,000 μg/L, at least 33,000 μg/L, at least 34,000 μg/L, at least 35,000 μg/L, at least 36,000 μg/L, at least 37,000 μg/L, at least 38,000 μg/L, at least 39,000 μg/L, at least 40,000 μg/L, at least 41,000 μg/L, at least 42,000 μg/L, at least 43,000 μg/L, at least 44,000 μg/L, at least 45,000 μg/L, at least 46,000 μg/L, at least 47,000 μg/L, at least 48,000 μg/L, at least 49,000 μg/L, at least 50,000 μg/L, at least 51,000 μg/L, at least 52,000 μg/L, at least 53,000 μg/L, at least 54,000 μg/L, at least 55,000 μg/L, at least 56,000 μg/L, at least 57,000 μg/L, at least 58,000 μg/L, at least 59,000 μg/L, at least 60,000 μg/L, at least 61,000 μg/L, at least 62,000 μg/L, at least 63,000 μg/L, at least 64,000 μg/L, at least 65,000 μg/L, at least 66,000 μg/L, at least 67,000 μg/L, at least 68,000 μg/L, at least 69,000 μg/L, at least 70,000 μg/L, at least 71,000 μg/L, at least 72,000 μg/L, at least 73,000 μg/L, at least 74,000 μg/L, at least 75,000 μg/L, at least 76,000 μg/L, at least 77,000 μg/L, at least 78,000 μg/L, at least 79,000 μg/L, at least 80,000 μg/L, at least 81,000 μg/L, at least 82,000 μg/L, at least 83,000 μg/L, at least 84,000 μg/L, at least 85,000 μg/L, at least 86,000 μg/L, at least 87,000 μg/L, at least 88,000 μg/L, at least 89,000 μg/L, at least 90,000 μg/L, at least 91,000 μg/L, at least 92,000 μg/L, at least 93,000 μg/L, at least 94,000 μg/L, at least 95,000 μg/L, at least 96,000 μg/L, at least 97,000 μg/L, at least 98,000 μg/L, at least 99,000 μg/L, at least 100,000 μg/L, at least 105,000 μg/L, at least 110,000 μg/L, at least 115,000 μg/L, at least 120,000 μg/L, at least 125,000 μg/L, at least 130,000 μg/L, at least 135,000 μg/L, at least 140,000 μg/L, at least 145,000 μg/L, at least 150,000 μg/L, at least 155,000 μg/L, at least 160,000 μg/L, at least 165,000 μg/L, at least 170,000 μg/L, at least 175,000 μg/L, at least 180,000 μg/L, at least 185,000 μg/L, at least 190,000 μg/L, at least 195,000 μg/L, at least 200,000 μg/L, at least 205,000 μg/L, at least 210,000 μg/L, at least 215,000 μg/L, at least 220,000 μg/L, at least 225,000 μg/L, at least 230,000 μg/L, at least 235,000 μg/L, at least 240,000 μg/L, at least 245,000 μg/L, at least 250,000 μg/L, at least 255,000 μg/L, at least 260,000 μg/L, at least 265,000 μg/L, at least 270,000 μg/L, at least 275,000 μg/L, at least 280,000 μg/L, at least 285,000 μg/L, at least 290,000 μg/L, at least 295,000 μg/L, at least 300,000 μg/L, at least 305,000 μg/L, at least 310,000 μg/L, at least 315,000 μg/L, at least 320,000 μg/L, at least 325,000 μg/L, at least 330,000 μg/L, at least 335,000 μg/L, at least 340,000 μg/L, at least 345,000 μg/L, at least 350,000 μg/L, at least 355,000 μg/L, at least 360,000 μg/L, at least 365,000 μg/L, at least 370,000 μg/L, at least 375,000 μg/L, at least 380,000 μg/L, at least 385,000 μg/L, at least 390,000 μg/L, at least 395,000 μg/L, at least 400,000 μg/L, at least 405,000 μg/L, at least 410,000 μg/L, at least 415,000 μg/L, at least 420,000 μg/L, at least 425,000 μg/L, at least 430,000 μg/L, at least 435,000 μg/L, at least 440,000 μg/L, at least 445,000 μg/L, at least 450,000 μg/L, at least 455,000 μg/L, at least 460,000 μg/L, at least 465,000 μg/L, at least 470,000 μg/L, at least 475,000 μg/L, at least 480,000 μg/L, at least 485,000 μg/L, at least 490,000 μg/L, at least 495,000 μg/L, at least 500,000 μg/L, at least 600,000 μg/L, at least 700,000 μg/L, at least 800,000 μg/L, at least 900,000 μg/L, or at least 1,000,000 μg/L, including all values in between, of a compound of Formula (6). In some embodiments, the compound of Formula (6) is olivetolic acid (Formula (6a)).

[0280] In some embodiments, a PKC may be capable of producing at least 1% (e.g., at least 5%, at least 10%, at least 15%, at least 20%, at least 25%, at least 30%, at least 35%, at least 40%, at least 45%, at least 50%, at least 55%, at least 60%, at least 65%, at least 70%, at least 75%, at least 80%, at least 85%, at least 90%, at least 95%, at least 100%, at least 125%, at least 150%, at least 175%, at least 200%, at least 300%, at least 400%, at least 500%, at least 600%, at least 700%, at least 800%, at least 900%, or at least 1,000%) more of one or more compounds of Formula (6) relative to a control. In some embodiments, the compound of Formula (6) is olivetolic acid (Formula (6a)).

[0281] In some embodiments, the ratio of two compounds produced by a PKC is assessed. As a non-limiting example, the ratio of the amount of a compound of Formula (6) to the amount of a compound of Formula (5) produced by a PKC can be assessed. In some embodiments, the amount of each product is measured in μg/L. In some embodiments, the compound of Formula (6) is a compound of Formula (6a) (olivetolic acid) and/or the compound of Formula (5) is a compound of Formula (5a) (olivetol). In some embodiments, a PKC produces a ratio of a compound of Formula (6) to a compound of Formula (5) that is at least 0.1, at least 0.2, at least 0.3, at least 0.4, at least 0.5, at least 0.6, at least 0.7, at least 0.8, at least 0.9, at least 1, at least 1.1, at least 1.2, at least 1.3, at least 1.4, at least 1.5, at least 1.6, at least 1.7, at least 1.8, at least 1.9, at least 2, at least 2.1, at least 2.2, at least 2.3, at least 2.4, at least 2.5, at least 2.6, at least 2.7, at least 2.8, at least 2.9, at least 3, at least 3.1, at least 3.2, at least 3.3, at least 3.4, at least 3.5, at least 3.6, at least 3.7, at least 3.8, at least 3.9, at least 4, at least 4.1, at least 4.2, at least 4.3, at least 4.4, at least 4.5, at least 4.6, at least 4.7, at least 4.8, at least 4.9, at least 5, at least 5.1, at least 5.2, at least 5.3, at least 5.4, at least 5.5, at least 5.6, at least 5.7, at least 5.8, at least 5.9, at least 6, at least 6.1, at least 6.2, at least 6.3, at least 6.4, at least 6.5, at least 6.6, at least 6.7, at least 6.8, at least 6.9, at least 7, at least 7.1, at least 7.2, at least 7.3, at least 7.4, at least 7.5, at least 7.6, at least 7.7, at least 7.8, at least 7.9, at least 8, at least 8.1, at least 8.2, at least 8.3, at least 8.4, at least 8.5, at least 8.6, at least 8.7, at least 8.8, at least 8.9, at least 9, at least 9.1, at least 9.2, at least 9.3, at least 9.4, at least 9.5, at least 9.6, at least 9.7, at least 9.8, at least 9.9, at least 10, at least 10.1, at least 10.2, at least 10.3, at least 10.4, at least 10.5, at least 10.6, at least 10.7, at least 10.8, at least 10.9, at least 11, at least 11.1, at least 11.2, at least 11.3, at least 11.4, at least 11.5, at least 11.6, at least 11.7, at least 11.8, at least 11.9, at least 12, at least 12.1, at least 12.2, at least 12.3, at least 12.4, at least 12.5, at least 12.6, at least 12.7, at least 12.8, at least 12.9, at least 13, at least 13.1, at least 13.2, at least 13.3, at least 13.4, at least 13.5, at least 13.6, at least 13.7, at least 13.8, at least 13.9, at least 14, at least 14.1, at least 14.2, at least 14.3, at least 14.4, at least 14.5, at least 14.6, at least 14.7, at least 14.8, at least 14.9, at least 15, at least 15.1, at least 15.2, at least 15.3, at least 15.4, at least 15.5, at least 15.6, at least 15.7, at least 15.8, at least 15.9, at least 16, at least 16.1, at least 16.2, at least 16.3, at least 16.4, at least 16.5, at least 16.6, at least 16.7, at least 16.8, at least 16.9, at least 17, at least 17.1, at least 17.2, at least 17.3, at least 17.4, at least 17.5, at least 17.6, at least 17.7, at least 17.8, at least 17.9, at least 18, at least 18.1, at least 18.2, at least 18.3, at least 18.4, at least 18.5, at least 18.6, at least 18.7, at least 18.8, at least 18.9, at least 19, at least 19.1, at least 19.2, at least 19.3, at least 19.4, at least 19.5, at least 19.6, at least 19.7, at least 19.8, at least 19.9, or at least 20, including all values in between. In some embodiments, a PKC produces a ratio of a compound of Formula (6) to a compound of a Formula (5) that is between 0.1 and 1, between 1 and 5, between 1 and 10, between 0.5 and 1, between 1 and 2, between 2 and 3, between 3 and 4, between 4 and 5, between 5 and 6, between 6 and 7, between 7 and 8, between 8 and 9, or between 9 and 10.

[0282] In some embodiments, a PKC produces a higher ratio of a compound of Formula (6) to a compound of Formula (5) as compared to a control. In some embodiments, the control is a PKC comprising SEQ ID NO: 1. In some embodiments, the control is a PKC that does not comprise one or more amino acid substitutions, deletions, or insertions present in the PKC that is being compared to the control.

[0283] In some embodiments, a PKC may be capable of producing at least 1% (e.g., at least 5%, at least 10%, at least 15%, at least 20%, at least 25%, at least 30%, at least 35%, at least 40%, at least 45%, at least 50%, at least 55%, at least 60%, at least 65%, at least 70%, at least 75%, at least 80%, at least 85%, at least 90%, at least 95%, at least 100%, at least 125%, at least 150%, at least 175%, at least 200%, at least 300%, at least 400%, at least 500%, at least 600%, at least 700%, at least 800%, at least 900%, or at least 1,000%) higher titer or yield of one or more compounds of Formula (6) relative to a control. In some embodiments, the compound of Formula (6) is olivetolic acid (Formula (6a)).

[0284] In some embodiments, a PKC may be capable of producing one or more compounds of Formula (6) at a rate that is at least 1% (e.g., at least 5%, at least 10%, at least 15%, at least 20%, at least 25%, at least 30%, at least 35%, at least 40%, at least 45%, at least 50%, at least 55%, at least 60%, at least 65%, at least 70%, at least 75%, at least 80%, at least 85%, at least 90%, at least 95%, at least 100%, at least 125%, at least 150%, at least 175%, at least 200%, at least 300%, at least 400%, at least 500%, at least 600%, at least 700%, at least 800%, at least 900%, or at least 1,000%) faster relative to a control. In some embodiments, the compound of Formula (6) is olivetolic acid (Formula (6a)).

[0285] In some embodiments, a PKC may be capable of producing at least 1% (e.g., at least 5%, at least 10%, at least 15%, at least 20%, at least 25%, at least 30%, at least 35%, at least 40%, at least 45%, at least 50%, at least 55%, at least 60%, at least 65%, at least 70%, at least 75%, at least 80%, at least 85%, at least 90%, at least 95%, at least 100%, at least 125%, at least 150%, at least 175%, at least 200%, at least 300%, at least 400%, at least 500%, at least 600%, at least 700%, at least 800%, at least 900%, or at least 1,000%) less of one or more compounds of Formula (6) relative to a control. In some embodiments, the compound of Formula (6) is olivetolic acid (Formula (6a)).

[0286] In some embodiments, a PKC may be capable of producing at least 1% (e.g., at least 5%, at least 10%, at least 15%, at least 20%, at least 25%, at least 30%, at least 35%, at least 40%, at least 45%, at least 50%, at least 55%, at least 60%, at least 65%, at least 70%, at least 75%, at least 80%, at least 85%, at least 90%, at least 95%, at least 100%, at least 125%, at least 150%, at least 175%, at least 200%, at least 300%, at least 400%, at least 500%, at least 600%, at least 700%, at least 800%, at least 900%, or at least 1,000%) lower titer or yield of one or more compounds of Formula (6) relative to a control. In some embodiments, the compound of Formula (6) is olivetolic acid (Formula (6a)).

[0287] In some embodiments, a PKC may be capable of producing one or more compounds of Formula (6) at a rate that is at least 1% (e.g., at least 5%, at least 10%, at least 15%, at least 20%, at least 25%, at least 30%, at least 35%, at least 40%, at least 45%, at least 50%, at least 55%, at least 60%, at least 65%, at least 70%, at least 75%, at least 80%, at least 85%, at least 90%, at least 95%, at least 100%, at least 125%, at least 150%, at least 175%, at least 200%, at least 300%, at least 400%, at least 500%, at least 600%, at least 700%, at least 800%, at least 900%, or at least 1,000%) slower relative to a control. In some embodiments, the compound of Formula (6) is olivetolic acid (Formula (6a)).

[0288] In some embodiments of methods described herein involving comparison of an experimental PKC enzyme to a control, the control is a wild-type reference PKC. In some embodiments, the control is wild-type CsOAC (SEQ ID NO: 1). In some embodiments, the control PKC is identical to an experimental PKC except for the presence of one or more amino acid substitutions, insertions, or deletions within the experimental PKC.

[0289] In some embodiments of methods described herein involving comparison of an experimental host cell to a control host cell, the control host cell is a host cell that does not comprise a heterologous polynucleotide encoding a PKC. In some embodiments, a control host cell is a wild type cell. In some embodiments, a control host cell is a host cell that comprises a heterologous polynucleotide encoding a PKC corresponding to SEQ ID NO: 1. In some embodiments, a control host cell is a host cell that comprises a heterologous polynucleotide comprising SEQ ID NO: 2 or 3. In some embodiments, a control host cell is genetically identical to an experimental host cell except for the presence of one or more amino acid substitutions, insertions, or deletions within a PKC that is heterologously expressed in the experimental host cell.

[0290] In some embodiments, a PKC is capable of producing a product mixture comprising a compound of Formula (6a) and one or more other compounds of Formula (6). In some embodiments, at least approximately 50-100%, at least approximately 50-60%, at least approximately 60-70%, at least approximately 70-80%, at least approximately 80-90%, at least approximately 90-100%, of compounds within the product mixture are compounds of Formula (6a). In some embodiments, a PKC is capable of producing at least 1.1 times, 1.2 times, 1.3 times, 1.4 times, 1.5 times, 1.6 times, 1.7 times, 1.8 times, 1.9 times, 2 times, 2.1 times, 2.2 times, 2.3 times, 2.4 times, 2.5 times, 2.6 times, 2.7 times, 2.8 times, 2.9 times, 3 times, 3.1 times, 3.2 times, 3.3 times, 3.4 times, 3.5 times, 3.6 times, 3.7 times, 3.8 times, 3.9 times, 4 times, 5 times, 6 times, 8 times, 9 times, 10 times, 20 times, 30 times, 40 times, 50 times, 60 times, 70 times, 80 times, 90 times, 100 times, 200 times, 300 times, 400 times, 500 times, 600 times, 700 times, 800 times or 1,000 times more of a compound of Formula (6a) than another compound of Formula (6). In some embodiments, a PKC is capable of producing at least 1.1 times, 1.2 times, 1.3 times, 1.4 times, 1.5 times, 1.6 times, 1.7 times, 1.8 times, 1.9 times, 2 times, 2.1 times, 2.2 times, 2.3 times, 2.4 times, 2.5 times, 2.6 times, 2.7 times, 2.8 times, 2.9 times, 3 times, 3.1 times, 3.2 times, 3.3 times, 3.4 times, 3.5 times, 3.6 times, 3.7 times, 3.8 times, 3.9 times, 4 times, 5 times, 6 times, 8 times, 9 times, 10 times, 20 times, 30 times, 40 times, 50 times, 60 times, 70 times, 80 times, 90 times, 100 times, 200 times, 300 times, 400 times, 500 times, 600 times, 700 times, 800 times or 1,000 times less of a compound of Formula (6a) than another compound of Formula (6).

### Additional Cannabinoid Pathway Enzymes

[0291] Methods for production of cannabinoids and cannabinoid precursors can further include expression of one or more of: an acyl activating enzyme (AAE); a polyketide synthase (PKS) (e.g., OLS); a polyketide cyclase (PKC); a prenyltransferase (PT); and a terminal synthase (TS).

### Acyl Activating Enzyme (AAE)

[0292] A host cell described in this disclosure may comprise an acyl activating enzyme (AAE). As used in this disclosure, an acyl activating enzyme (AAE) refers to an enzyme that is capable of catalyzing the esterification between a thiol and a substrate (e.g., optionally substituted aliphatic or aryl group) that has a carboxylic acid moiety. In some embodiments, an AAE is capable of using Formula (1):

[chemical structure]

[0293] or a salt, solvate, hydrate, polymorph, co-crystal, tautomer, stereoisomer, isotopically labeled derivative thereof to produce a product of Formula (2):

[chemical structure]

[0294] R is as defined in this application. In certain embodiments, R is hydrogen. In certain embodiments, R is optionally substituted alkyl. In certain embodiments, R is optionally substituted C1-40 alkyl. In certain embodiments, R is optionally substituted C₂₋₄₀ alkyl. In certain embodiments, R is optionally substituted C₂₋₄₀ alkyl, which is straight chain or branched alkyl. In certain embodiments, R is optionally substituted C2-10 alkyl, optionally substituted C10-C20 alkyl, optionally substituted C20-C30 alkyl, optionally substituted C30-C40 alkyl, or optionally substituted C40-C50 alkyl, which is straight chain or branched alkyl. In certain embodiments, R is optionally substituted C3-8 alkyl. In certain embodiments, R is optionally substituted C1-C40 alkyl, C1-C20 alkyl, C1-C10 alkyl, C1-C8 alkyl, C1-C5 alkyl, C3-C5 alkyl, C3 alkyl, or C5 alkyl. In certain embodiments, R is optionally substituted C1-C20 alkyl. In certain embodiments, R is optionally substituted C1-C20 branched alkyl. In certain embodiments, R is optionally substituted C1-C20 alkyl, optionally substituted C1-C10 alkyl, optionally substituted C10-C20 alkyl, optionally substituted C20-C30 alkyl, optionally substituted C30-C40 alkyl, or optionally substituted C40-C50 alkyl. In certain embodiments, R is optionally substituted C1-C10 alkyl. In certain embodiments, R is optionally substituted C3 alkyl. In certain embodiments, R is optionally substituted n-propyl. In certain embodiments, R is unsubstituted n-propyl. In certain embodiments, R is optionally substituted C1-C8 alkyl. In some embodiments, R is a C2-C6 alkyl. In certain embodiments, R is optionally substituted C1-C5 alkyl. In certain embodiments, R is optionally substituted C3-C5 alkyl. In certain embodiments, R is optionally substituted C3 alkyl. In certain embodiments, R is optionally substituted C5 alkyl. In certain embodiments, R is of formula:

[chemical structure]

In certain embodiments, R is of formula:

[chemical structure]

In certain embodiments, R is of formula:

[chemical structure]

[0295] In certain embodiments, R is of formula:

[chemical structure]

In certain embodiments, R is optionally substituted propyl. In certain embodiments, R is optionally substituted n-propyl. In certain embodiments, R is n-propyl optionally substituted with optionally substituted aryl. In certain embodiments, R is n-propyl optionally substituted with optionally substituted phenyl. In certain embodiments, R is n-propyl substituted with unsubstituted phenyl. In certain embodiments, R is optionally substituted butyl. In certain embodiments, R is optionally substituted n-butyl. In certain embodiments, R is n-butyl optionally substituted with optionally substituted aryl. In certain embodiments, R is n-butyl optionally substituted with optionally substituted phenyl. In certain embodiments, R is n-butyl substituted with unsubstituted phenyl. In certain embodiments, R is optionally substituted pentyl. In certain embodiments, R is optionally substituted n-pentyl. In certain embodiments, R is n-pentyl optionally substituted with optionally substituted aryl. In certain embodiments, R is n-pentyl optionally substituted with optionally substituted phenyl. In certain embodiments, R is n-pentyl substituted with unsubstituted phenyl. In certain embodiments, R is optionally substituted hexyl. In certain embodiments, R is optionally substituted n-hexyl. In certain embodiments, R is optionally substituted n-heptyl. In certain embodiments, R is optionally substituted n-octyl. In certain embodiments, R is alkyl optionally substituted with aryl (e.g., phenyl). In certain embodiments, R is optionally substituted acyl (e.g., —C(═O)Me).

[0296] In certain embodiments, R is optionally substituted alkenyl (e.g., substituted or unsubstituted C₂₋₆ alkenyl). In certain embodiments, R is substituted or unsubstituted C₂₋₆ alkenyl. In certain embodiments, R is substituted or unsubstituted C₂₋₅ alkenyl. In certain embodiments, R is of formula:

[chemical structure]

In certain embodiments, R is optionally substituted alkynyl (e.g., substituted or unsubstituted C₂₋₆ alkynyl). In certain embodiments, R is substituted or unsubstituted C₂₋₆ alkynyl. In certain embodiments, R is of formula:

[chemical structure]

In certain embodiments, R is optionally substituted carbocyclyl. In certain embodiments, R is optionally substituted aryl (e.g., phenyl or napthyl).

[0297] In some embodiments, a substrate for an AAE is produced by fatty acid metabolism within a host cell. In some embodiments, a substrate for an AAE is provided exogenously.

[0298] In some embodiments, an AAE is capable of catalyzing the formation of hexanoyl-coenzyme A (hexanoyl-CoA) from hexanoic acid and coenzyme A (CoA). In some embodiments, an AAE is capable of catalyzing the formation of butanoyl-coenzyme A (butanoyl-CoA) from butanoic acid and coenzyme A (CoA).

[0299] As one of ordinary skill in the art would appreciate, an AAE could be obtained from any source, including naturally occurring sources and synthetic sources (e.g., a non-naturally occurring AAE). In some embodiments, the AAE is endogenous to the host cell, such as a Saccharomyces cerevisiae. In some embodiments, an AAE is a Cannabis enzyme. Non-limiting examples of AAEs include C. sativa hexanoyl-CoA synthetase 1 (CsHCS1) and C. sativa hexanoyl-CoA synthetase 2 (CsHCS2) as disclosed in U.S. Pat. No. 9,546,362, which is incorporated by reference in this application in its entirety.

CsHCS1 has the sequence:
(SEQ ID NO: 5)
MGKNYKSLDSVVASDFIALGITSEVAETLHGRLAEIVCNYGAATPQTWIN
IANHILSPDLPFSLHQMLFYGCYKDFGPAPPAWIPDPEKVKSTNLGALLE
KRGKEFLGVKYKDPISSFSHFQEFSVRNPEVYWRTVLMDEMKISFSKDPE
CILRRDDINNPGGSEWLPGGYLNSAKNCLNVNSNKKLNDTMIVWRDEGND
DLPLNKLTLDQLRKRVWLVGYALEEMGLEKGCAIAIDMPMHVDAVVIYLA
IVLAGYVVVSIADSFSAPEISTRLRLSKAKAIFTQDHIIRGKKRIPLYSR
VVEAKSPMAIVIPCSGSNIGAELRDGDISWDYFLERAKEFKNCEFTAREQ
PVDAYTNILFSSGTTGEPKAIPWTQATPLKAAADGWSHLDIRKGDVIVWP
TNLGWMMGPWLVYASLLNGASIALYNGSPLVSGFAKFVQDAKVTMLGVVP
SIVRSWKSTNCVSGYDWSTIRCFSSSGEASNVDEYLWLMGRANYKPVIEM
CGGTEIGGAFSAGSFLQAQSLSSFSSQCMGCTLYILDKNGYPMPKNKPGI
GELALGPVMFGASKTLLNGNHHDVYFKGMPTLNGEVLRRHGDIFELTSNG
YYHAHGRADDTMNIGGIKISSIEIERVCNEVDDRVFETTAIGVPPLGGGP
EQLVIFFVLKDSNDTTIDLNQLRLSFNLGLQKKLNPLFKVTRVVPLSSLP
RTATNKIMRRVLRQFSHFE.
CsHCS2 has the sequence:
(SEQ ID NO: 6)
MEKSGYGRDGIYRSLRPPLHLPNNNNLSMVSFLFRNSSSYPQKPALIDSE
TNQILSFSHFKSTVIKVSHGFLNLGIKKNDVVLIYAPNSIHFPVCFLGII
ASGAIATTSNPLYTVSELSKQVKDSNPKLIITVPQLLEKVKGFNLPTILI
GPDSEQESSSDKVMTFNDLVNLGGSSGSEFPIVDDFKQSDTAALLYSSGT
TGMSKGVVLTHKNFIASSLMVTMEQDLVGEMDNVFLCFLPMFHVFGLAII
TYAQLQRGNTVISMARFDLEKMLKDVEKYKVTHLWVVPPVILALSKNSMV
KKFNLSSIKYIGSGAAPLGKDLMEECSKVVPYGIVAQGYGMTETCGIVSM
EDIRGGKRNSGSAGMLASGVEAQIVSVDTLKPLPPNQLGEIWVKGPNMMQ
GYFNNPQATKLTIDKKGWVHTGDLGYFDEDGHLYVVDRIKELIKYKGFQV
APAELEGLLVSHPEILDAVVIPFPDAEAGEVPVAYVVRSPNSSLTENDVK
KFIAGQVASFKRLRKVTFINSVPKSASGKILRRELIQKVRSNM.

### Polyketide Synthases (PKS)

[0300] A host cell described in this application may comprise a PKS. As used in this application, a “PKS” refers to an enzyme that is capable of producing a polyketide. In certain embodiments, a PKS converts a compound of Formula (2) to a compound of Formula (4), (5), and/or (6). In certain embodiments, a PKS converts a compound of Formula (2) to a compound of Formula (4). In certain embodiments, a PKS converts a compound of Formula (2) to a compound of Formula (5). In certain embodiments, a PKS converts a compound of Formula (2) to a compound of Formula (4) and/or (5). In certain embodiments, a PKS converts a compound of Formula (2) to a compound of Formula (5) and/or (6).

[0301] In some embodiments, a PKS is a tetraketide synthase (TKS). In certain embodiments, a PKS is an olivetol synthase (OLS). As used in this application, an “OLS” refers to an enzyme that is capable of using a substrate of Formula (2a) to form a compound of Formula (4a), (5a) or (6a) as shown in FIG. 1.

[0302] In certain embodiments, a PKS is a divarinic acid synthase (DVS).

[0303] In certain embodiments, polyketide synthases can use hexanoyl-CoA or any acyl-CoA (or a product of Formula (2):

[chemical structure]

and three malonyl-CoAs as substrates to form 3,5,7-trioxododecanoyl-CoA or other 3,5,7-trioxo-acyl-CoA derivatives; or to form a compound of Formula (4):

[chemical structure]

wherein R is hydrogen, optionally substituted acyl, optionally substituted alkyl, optionally substituted alkenyl, optionally substituted alkynyl, optionally substituted carbocyclyl, or optionally substituted aryl; depending on substrate. R is as defined in this application. In some embodiments, R is a C2-C6 optionally substituted alkyl. In some embodiments, R is a propyl or pentyl. In some embodiments, R is pentyl. In some embodiments, R is propyl. A PKS may also bind isovaleryl-CoA, octanoyl-CoA, hexanoyl-CoA, and butyryl-CoA. In some embodiments, a PKS is capable of catalyzing the formation of a 3,5,7-trioxoalkanoyl-CoA (e.g. 3,5,7-trioxododecanoyl-CoA). In some embodiments, an OLS is capable of catalyzing the formation of a 3,5,7-trioxoalkanoyl-CoA (e.g. 3,5,7-trioxododecanoyl-CoA).

[0304] In some embodiments, a PKS uses a substrate of Formula (2) to form a compound of Formula (4):

[chemical structure]

wherein R is unsubstituted pentyl.

[0305] As one of ordinary skill in the art would appreciate a PKS, such as an OLS, could be obtained from any source, including naturally occurring sources and synthetic sources (e.g., a non-naturally occurring PKS). In some embodiments a PKS is from Cannabis. In some embodiments, a PKS is from Dictyostelium. In some embodiments, a PKS comprises SEQ ID NO: 195. See, e.g., Example 1. Non-limiting examples of PKS enzymes may be found in U.S. Pat. No. 6,265,633; WO 2018/148848 A1; WO 2018/148849 A1; U.S. Patent Application Publication No. 2018/155748; and WO 2020/176547, which are incorporated by reference in this application in their entireties.

[0306] A non-limiting example of an OLS is provided by UniProtKB-B1Q2B6 from C. sativa. In C. sativa, this OLS uses hexanoyl-CoA and malonyl-CoA as substrates to form 3,5,7-trioxododecanoyl-CoA. OLS (e.g., UniProtKB-B1Q2B6) in combination with olivetolic acid cyclase (OAC) produces olivetolic acid (OA) in C. sativa.

[0307] The amino acid sequence of UniProtKB-B1Q2B6 is:

(SEQ ID NO: 7)
MNHLRAEGPASVLAIGTANPENILLQDEFPDYYFRVTKSEHMTQLKEKFR
KICDKSMIRKRNCFLNEEHLKQNPRLVEHEMQTLDARQDMLVVEVPKLGK
DACAKAIKEWGQPKSKITHLIFTSASTTDMPGADYHCAKLLGLSPSVKRV
MMYQLGCYGGGTVLRIAKDIAENNKGARVLAVCCDIMACLFRGPSESDLE
LLVGQAIFGDGAAAVIVGAEPDESVGERPIFELVSTGQTILPNSEGTIGG
HIREAGLIFDLHKDVPMLISNNIEKCLIEAFTPIGISDWNSIFWITHPGG
KAILDKVEEKLHLKSDKFVDSRHVLSEHGNMSSSTVLFVMDELRKRSLEE
GKSTTGDGFEWGVLFGFGPGLTVERVVVRSVPIKY.

[0308] PKS enzymes described in this application may or may not have cyclase activity. In some embodiments where the PKS enzyme does not have cyclase activity, one or more exogenous polynucleotides that encode a polyketide cyclase (PKC) enzyme may also be co-expressed in the same host cells to enable conversion of hexanoic acid or butyric acid or other fatty acid conversion into olivetolic acid or divarinolic acid or other precursors of cannabinoids. In some embodiments, the PKS enzyme and a PKC enzyme are expressed as separate distinct enzymes. In some embodiments, a PKS enzyme that lacks cyclase activity and a PKC are linked as part of a fusion polypeptide that is a bifunctional PKS. In some embodiments, a bifunctional PKC is referred to as a bifunctional PKS-PKC. In some embodiments, a bifunctional PKC is a bifunctional tetraketide synthase (TKS-TKC). As used in this application, a bifunctional PKS is an enzyme that is capable of producing a compound of Formula (6):

[chemical structure]

from a compound of Formula (2):

[chemical structure]

and a compound of Formula (3):

[chemical structure]

In some embodiments, a PKS produces more of a compound of Formula (6):

[chemical structure]

as compared to a compound of Formula (5):

[chemical structure]

As a non-limiting example, a compound of Formula (6):

[chemical structure]

is olivetolic acid (Formula (6a)):

[chemical structure]

As a non-limiting example, a compound of Formula (5):

[chemical structure]

is olivetol (Formula (5a)):

[chemical structure]

[0309] In some embodiments, a polyketide synthase of the present disclosure is capable of catalyzing a compound of Formula (2):

[chemical structure]

and a compound of Formula (3):

[chemical structure]

to produce a compound of Formula (4):

[chemical structure]

and also further catalyzes a compound of Formula (4):

[chemical structure]

to produce a compound of Formula (6):

[chemical structure]

In some embodiments, the PKS is not a fusion protein. In some embodiments, a PKS that is capable of catalyzing a compound of Formula (2):

[chemical structure]

and a compound of Formula (3):

[chemical structure]

to produce a compound of Formula (4):

[chemical structure]

and is also capable of further catalyzing the production of a compound of Formula (6):

[chemical structure]

from the compound of Formula (4):

[chemical structure]

is preferred because it avoids the need for an additional polyketide cyclase to produce a compound of Formula (6):

[chemical structure]

In some embodiments, such an enzyme that is a bifunctional PKS eliminates the transport considerations needed with addition of a polyketide cyclase, whereby the compound of Formula (4), being the product of the PKS, must be transported to the PKS for use as a substrate to be converted into the compound of Formula (6).

[0310] In some embodiments, a PKS is capable of producing olivetolic acid in the presence of a compound of Formula (2a):

[chemical structure]

### and Formula (3a):

[chemical structure]

[0312] In some embodiments, an OLS is capable of producing olivetolic acid in the presence of a compound of Formula (2a):

[chemical structure]

### and Formula (3a):

[chemical structure]

### Prenyltransferase (PT)

[0314] A host cell described in this application may comprise a prenyltransferase (PT). As used in this application, a “PT” refers to an enzyme that is capable of transferring prenyl groups to acceptor molecule substrates. Non-limiting examples of prenyltransferases are described in U.S. Pat. No. 7,544,498 and Kumano et al., Bioorg Med Chem. 2008 Sep. 1; 16(17): 8117-8126 (e.g., NphB), PCT Publication No. WO 2018/200888 (e.g., CsPT4), U.S. Pat. No. 8,884,100 (e.g., CsPT1); CA2718469; Valliere et al., Nat Commun. 2019 Feb. 4; 10(1):565 (e.g., NphB variants); PCT Publication Nos: WO2019/173770, WO2019/183152, and WO2020/210810 (e.g., NphB variants); Luo et al., Nature 2019 March;567(7746):123-126 (e.g., CsPT4); WO 2021/034848; U.S. 63/091,292 and U.S. 63/188,442 (e.g., CsPT variants and chimeras), which are incorporated by reference in their entireties. In some embodiments, a PT is capable of producing cannabigerolic acid (CBGA), cannabigerophorolic acid (CBGPA), cannabigerovarinic acid (CBGVA), a CBG-type cannabinoid, or other cannabinoids or cannabinoid-like substances. In some embodiments, a PT is cannabigerolic acid synthase (CBGAS). In some embodiments, a PT is cannabigerovarinic acid synthase (CBGVAS).

[0315] In some embodiments, the PT is an NphB prenyltransferase. See, e.g., U.S. Pat. No. 7,544,498; and Kumano et al., Bioorg Med Chem. 2008 Sep. 1; 16(17): 8117-8126, which are incorporated by reference in this application in their entireties. In some embodiments, a PT corresponds to NphB from Streptomyces sp. (see, e.g., UniprotKB Accession No. Q4R2T2; see also SEQ ID NO: 2 of U.S. Pat. No. 7,361,483). The protein sequence corresponding to UniprotKB Accession No. Q4R2T2 is provided by SEQ ID NO: 8:

(SEQ ID NO: 8)
MSEAADVERVYAAMEEAAGLLGVACARDKIYPLLSTFQDTLVEGGSVVVF
SMASGRHSTELDFSISVPTSHGDPYATVVEKGLFPATGHPVDDLLADTQK
HLPVSMFAIDGEVTGGFKKTYAFFPTDNMPGVAELSAIPSMPPAVAENAE
LFARYGLDKVQMTSMDYKKRQVNLYFSELSAQTLEAESVLALVRELGLHV
PNELGLKFCKRSFSVYPTLNWETGKIDRLCFAVISNDPTLVPSSDEGDIE
KFHNYATKAPYAYVGEKRTLVYGLTLSPKEEYYKLGAYYHITDVQRGLLK
AFDSLED.

[0316] A non-limiting example of a nucleic acid sequence encoding NphB is:

(SED ID NO: 9)
atgtcagaagccgcagatgtcgaaagagtttacgccgctatggaagaagc
cgccggtttgttaggtgttgcctgtgccagagataagatctacccattgt
tgtctacttttcaagatacattagttgaaggtggttcagttgttgttttc
tctatggcttcaggtagacattctacagaattggatttctctatctcagt
tccaacatcacatggtgatccatacgctactgttgttgaaaaaggtttat
ttccagcaacaggtcatccagttgatgatttgttggctgatactcaaaag
catttgccagtttctatgtttgcaattgatggtgaagttactggtggttt
caagaaaacttacgctttctttccaactgataacatgccaggtgttgcag
aattatctgctattccatcaatgccaccagctgttgcagaaaatgcagaa
ttatttgctagatacggtttggataaggttcaaatgacatctatggatta
caagaaaagacaagttaatttgtacttttctgaattatcagcacaaactt
tggaagctgaatcagttttggcattagttagagaattgggtttacatgtt
ccaaacgaattgggtttgaagttttgtaaaagatctttctcagtttatcc
aactttaaactgggaaacaggcaagatcgatagattatgtttcgcagtta
tctctaacgatccaacattggttccatcttcagatgaaggtgatatcgaa
aagtttcataactacgctactaaagcaccatatgcttacgttggtgaaaa
gagaacattagtttatggtttgactttatcaccaaaggaagaatactaca
agttgggtgcttactaccacattaccgacgtacaaagaggtttattgaaa
gcattcgatagtttagaagactaa.

[0317] In other embodiments, a PT corresponds to CsPT1, which is disclosed as SEQ ID NO:2 in U.S. Pat. No. 8,884,100 (C. sativa; corresponding to SEQ ID NO: 10 in this application):

(SEQ ID NO: 10)
MGLSSVCTFSFQTNYHTLLNPHNNNPKTSLLCYRHPKTPIKYSYNNFPSK
HCSTKSFHLQNKCSESLSIAKNSIRAATTNQTEPPESDNHSVATKILNFG
KACWKLQRPYTIIAFTSCACGLFGKELLHNTNLISWSLMFKAFFFLVAIL
CIASFTTTINQIYDLHIDRINKPDLPLASGEISVNTAWIMSIIVALFGLI
ITIKMKGGPLYIFGYCFGIFGGIVYSVPPFRWKQNPSTAFLLNFLAHIIT
NFTFYYASRAALGLPFELRPSFTFLLAFMKSMGSALALIKDASDVEGDTK
FGISTLASKYGSRNLTLFCSGIVLLSYVAAILAGIIWPQAFNSNVMLLSH
AILAFWLILQTRDFALTNYDPEAGRRFYEFMWKLYYAEYLVYVFI.

[0318] In some embodiments, a PT corresponds to CsPT4, which is disclosed as SEQ ID NO:1 in WO 2019/071000, corresponding to SEQ ID NO: 11 in this application:

(SEQ ID NO: 11)
MGLSLVCTFSFQTNYHTLLNPHNKNPKNSLLSYQHPKTPIIKSSYDNFPS
KYCLTKNFHLLGLNSHNRISSQSRSIRAGSDQIEGSPHHESDNSIATKIL
NFGHTCWKLQRPYVVKGMISIACGLFGRELFNNRHLFSWGLMWKAFFALV
PILSFNFFAAIMNQIYDVDIDRINKPDLPLVSGEMSIETAWILSIIVALT
GLIVTIKLKSAPLFVFIYIFGIFAGFAYSVPPIRWKQYPFTNFLITISSH
VGLAFTSYSATTSALGLPFVWRPAFSFIIAFMTVMGMTIAFAKDISDIEG
DAKYGVSTVATKLGARNMTFVVSGVLLLNYLVSISIGIIWPQVFKSNIMI
LSHAILAFCLIFQTRELALANYASAPSRQFFEFIWLLYYAEYFVYVFI.

[0319] In some embodiments, a PT corresponds to a truncated CsPT4, which is provided as SEQ ID NO: 12 herein:

MSAGSDQIEGSPHHESDNSIATKILNFGHTCWKLQRPYVVKGMISIACGL
FGRELFNNRHLFSWGLMWKAFFALVPILSFNFFAAIMNQIYDVDIDRINK
PDLPLVSGEMSIETAWILSIIVALTGLIVTIKLKSAPLFVFIYIFGIFAG
FAYSVPPIRWKQYPFTNFLITISSHVGLAFTSYSATTSALGLPFVWRPAF
SFIIAFMTVMGMTIAFAKDISDIEGDAKYGVSTVATKLGARNMTFVVSGV
LLLNYLVSISIGIIWPQVFKSNIMILSHAILAFCLIFQTRELALANYASA
PSRQFFEFIWLLYYAEYFVYVFI.

[0320] Functional expression of paralog C. sativa CBGAS enzymes in S. cerevisiae and production of the major cannabinoid CBGA has been reported (Page and Boubakir U.S. Patent Application Publication No. 2012/0144523, 2012, and Luo et al. Nature, 2019). Luo et al. reported the production of CBGA in S. cerevisiae by expressing a truncated version of a C. sativa CBGAS, CsPT4, with its native signal peptide removed (Luo et al. Nature, 2019). Without being bound by a particular theory, the integral-membrane nature of C. sativa CBGAS enzymes may render functional expression of C. sativa CBGAS enzymes in heterologous hosts challenging. Removal of transmembrane domain(s) or signal sequences or use of prenyltransferases that are not associated with the membrane and are not integral membrane proteins may facilitate increased interaction between the enzyme and available substrate, for example in the cellular cytosol and/or in organelles that may be targeted using peptides that confer localization.

[0321] In some embodiments, the PT is a soluble PT. In some embodiments, the PT is a cytosolic PT. In some embodiments, the PT is a secreted protein. In some embodiments, the PT is not a membrane-associated protein. In some embodiments, the PT is not an integral membrane protein. In some embodiments, the PT does not comprise a transmembrane domain or a predicted transmembrane. In some embodiments, the PT may be primarily detected in the cytosol (e.g., detected in the cytosol to a greater extent than detected associated with the cell membrane). In some embodiments, the PT is a protein from which one or more transmembrane domains have been removed and/or mutated (e.g., by truncation, deletions, substitutions, insertions, and/or additions) so that the PT localizes or is predicted to localize in the cytosol of the host cell, or to cytosolic organelles within the host cell, or, in the case of bacterial hosts, in the periplasm. In some embodiments, the PT is a protein from which one or more transmembrane domains have been removed or mutated (e.g., by truncation, deletions, substitutions, insertions, and/or additions) so that the PT has increased localization to the cytosol, organelles, or periplasm of the host cell, as compared to membrane localization.

[0322] Within the scope of the term “transmembrane domains” are predicted or putative transmembrane domains in addition to transmembrane domains that have been empirically determined. In general, transmembrane domains are characterized by a region of hydrophobicity that facilitates integration into the cell membrane. Methods of predicting whether a protein is a membrane protein or a membrane-associated protein are known in the art and may include, for example amino acid sequence analysis, hydropathy plots, and/or protein localization assays.

[0323] In some embodiments, the PT is a protein from which a signal sequence has been removed and/or mutated so that the PT is not directed to the cellular secretory pathway. In some embodiments, the PT is a protein from which a signal sequence has been removed and/or mutated so that the PT is localized to the cytosol or has increased localization to the cytosol (e.g., as compared to the secretory pathway).

[0324] In some embodiments, the PT is a secreted protein. In some embodiments, the PT contains a signal sequence.

[0325] In some embodiments, a PT is a fusion protein. For example, a PT may be fused to one or more genes in the metabolic pathway of a host cell. In certain embodiments, a PT may be fused to mutant forms of one or more genes in the metabolic pathway of a host cell.

[0326] In some embodiments, a PT described in this application transfers one or more prenyl groups to any of positions 1, 2, 3, 4, or 5 in a compound of Formula (6), shown below:

[chemical structure]

[0327] In some embodiments, the PT transfers a prenyl group to any of positions 1, 2, 3, 4, or 5 in a compound of Formula (6), shown below:

[chemical structure]

to form a compound of one or more of Formula (8w), Formula (8x), Formula (8′), Formula (8y), Formula (8z):

[chemical structure]

or a pharmaceutically acceptable salt, solvate, hydrate, polymorph, co-crystal, tautomer, stereoisomer, isotopically labeled derivative, or prodrug thereof, wherein a is 1, 2, 3, 4, 5, 6, 7, 8, 9, or 10.

### Terminal Synthases (TS)

[0328] A host cell described in this application may comprise a terminal synthase (TS). As used in this application, a “TS” refers to an enzyme that is capable of catalyzing oxidative cyclization of a prenyl moiety (e.g., terpene) to produce a ring-containing product (e.g., heterocyclic ring-containing product). In certain embodiments, a TS is capable of catalyzing oxidative cyclization of a prenyl moiety (e.g., terpene) to produce a carbocyclic-ring containing product (e.g., cannabinoid). In certain embodiments, a TS is capable of catalyzing oxidative cyclization of a prenyl moiety (e.g., terpene) to produce a heterocyclic-ring containing product (e.g., cannabinoid). In certain embodiments, a TS is capable of catalyzing oxidative cyclization of a prenyl moiety (e.g., terpene) to produce a cannabinoid. In some embodiments, a terminal synthase is a terpene cyclase that uses a terpenophenolic compound as a substrate.

[0329] In some embodiments, a TS is a tetrahydrocannabinolic acid synthase (THCAS), a cannabidiolic acid synthase (CBDAS), and/or a cannabichromenic acid synthase (CBCAS). As one of ordinary skill in the art would appreciate a TS could be obtained from any source, including naturally occurring sources and synthetic sources (e.g., a non-naturally occurring TS).

[0330] a. Substrates

[0331] A TS may be capable of using one or more substrates. In some instances, the location of the prenyl group and/or the R group differs between TS substrates. For example, a TS may be capable of using as a substrate one or more compounds of Formula (8w), Formula (8x), Formula (8′), Formula (8y), and/or Formula (8z):

[chemical structure]

or a pharmaceutically acceptable salt, solvate, hydrate, polymorph, co-crystal, tautomer, stereoisomer, isotopically labeled derivative, or prodrug thereof, wherein a is 1, 2, 3, 4, 5, 6, 7, 8, 9, or 10.

[0332] In certain embodiments, a compound of Formula (8′) is a compound of Formula

[chemical structure]

[0333] In some embodiments, a TS catalyzes oxidative cyclization of the prenyl moiety (e.g., terpene) of a compound of Formula (8) described in this application and shown in FIG. 2. In certain embodiments, a compound of Formula (8) is a compound of Formula (8a):

[chemical structure]

[0334] b. Products

[0335] In embodiments wherein CBGA is the substrate, the TS enzymes CBDAS, THCAS and CBCAS would generally catalyze the formation of cannabidiolic acid (CBDA), A9-tetrahydrocannabinolic acid (THCA) and cannabichromenic acid (CBCA), respectively. However, in some embodiments, a TS can produce more than one different product depending on reaction conditions. For example, the pH of the reaction environment may cause a THCAS or a CBDAS to produce CBCA in greater proportions than THCA or CBDAS, respectively (see, for example, U.S. Pat. No. 9,359,625 to Winnicki and Donsky, incorporated by reference in its entirety). In some embodiments, a TS has a predetermined product specificity in intracellular conditions, such as cytosolic conditions or organelle conditions. By expressing a TS with a predetermined product specificity based on intracellular conditions, in vivo products produced by a cell expressing the TS may be more predictably produced. In some embodiments, a TS produces a desired product at a pH of 5.5. In some embodiments, a TS produces a desired product at a pH of 1, 2, 3, 4, 5, 6, 7, 8, 9, 10, 11, 12, 13 or 14. In some embodiments, a TS produces a desired product at a pH that is between 4.5 and 8.0. In some embodiments, a TS produces a desired product at a pH that is between 5 and 6. In some embodiments, a TS produces a desired product at a pH that is around 4.5, 4.6, 4.7, 4.8, 4.9, 5.0, 5,1, 5.2, 5.3, 5.4, 5.5, 5.6, 5.7, 5.8, 5.9, 6.0, 6.1, 6.2, 6.3, 6.4, 6.5, 6.6, 6.7, 6.8, 6.9, 7.0, 7.1, 7.2, 7.3, 7.4, 7.5, 7.6, 7.7, 7.8, 7.9, or 8.0, including all values in between. In some embodiments, the product profile of a TS is dependent on the TS's signal peptide because the signal peptide targets the TS to a particular intracellular location having particular intracellular conditions (e.g. a particular organelle) that regulate the type of product produced by the TS.

[0336] A TS may be capable of using one or more substrates described in this application to produce one or more products. Non-limiting example of TS products are shown in Table 1. In some instances, a TS is capable of using one substrate to produce 1, 2, 3, 4, 5, 6, 7, 8, 9, or 10 different products. In some embodiments, a TS is capable of using more than one substrate to produce 1, 2, 3, 4, 5, 6, 7, 8, 9, or 10 different products.

[0337] In some embodiments, a TS is capable of producing a compound of Formula (X-A) and/or a compound of Formula (X-B):

[chemical structure]

or a pharmaceutically acceptable salt, solvate, hydrate, polymorph, co-crystal, tautomer, stereoisomer, isotopically labeled derivative, or prodrug thereof;
[0338] wherein [symbol] is a double bond or a single bond, as valency permits;
[0339] R is hydrogen, optionally substituted acyl, optionally substituted alkyl, optionally substituted alkenyl, optionally substituted alkynyl, optionally substituted carbocyclyl, or optionally substituted aryl;
[0340] R^{Z1} is hydrogen, optionally substituted acyl, optionally substituted alkyl, optionally substituted alkenyl, optionally substituted alkynyl, optionally substituted carbocyclyl, or optionally substituted aryl;
[0341] R^{Z2} is hydrogen, optionally substituted acyl, optionally substituted alkyl, optionally substituted alkenyl, optionally substituted alkynyl, optionally substituted carbocyclyl, or optionally substituted aryl;
[0342] or optionally, R^{Z1} and R^{Z2} are taken together with their intervening atoms to form an optionally substituted carbocyclic ring;
[0343] R^{3A} is hydrogen, optionally substituted acyl, optionally substituted alkyl, optionally substituted alkenyl, or optionally substituted alkynyl;
[0344] R^{3B} is hydrogen, optionally substituted acyl, optionally substituted alkyl, optionally substituted alkenyl, or optionally substituted alkynyl; and/or
[0345] R^{Y} is hydrogen, optionally substituted acyl, optionally substituted alkyl, optionally substituted alkenyl, or optionally substituted alkynyl.

[0346] In some embodiments, a compound of Formula (X-A) is:

[chemical structure]

[0347] In certain embodiments, a compound of Formula (10)

[chemical structure]

has a chiral atom labeled with * at carbon 10 and a chiral atom labeled with ** at carbon 6. In certain embodiments, in a compound of Formula (10)

[chemical structure]

the chiral atom labeled with * at carbon 10 is of the R-configuration or S-configuration; and a chiral atom labeled with ** at carbon 6 is of the R-configuration. In certain embodiments, in a compound of Formula (10)

[chemical structure]

the chiral atom labeled with * at carbon 10 is of the S-configuration; and a chiral atom labeled with ** at carbon 6 is of the R-configuration or S-configuration. In certain embodiments, in a compound of Formula (10)

[chemical structure]

the chiral atom labeled with * at carbon 10 is of the R-configuration and a chiral atom labeled with ** at carbon 6 is of the R-configuration. In certain embodiments, a compound of Formula (10)

[chemical structure]

is of the formula:

[chemical structure]

In certain embodiments, in a compound of Formula (10)

[chemical structure]

the chiral atom labeled with * at carbon 10 is of the S-configuration and a chiral atom labeled with ** at carbon 6 is of the S-configuration. In certain embodiments, a compound of Formula (10)

[chemical structure]

is of the formula:

[chemical structure]

[0348] In certain embodiments, a compound of Formula (10a)

[chemical structure]

has a chiral atom labeled with * at carbon 10 and a chiral atom labeled with ** at carbon 6. In certain embodiments, in a compound of Formula (10a)

[chemical structure]

the chiral atom labeled with * at carbon 10 is of the R-configuration or S-configuration; and a chiral atom labeled with ** at carbon 6 is of the R-configuration. In certain embodiments, in a compound of Formula (10a)

[chemical structure]

the chiral atom labeled with * at carbon 10 is of the S-configuration; and a chiral atom labeled with ** at carbon 6 is of the R-configuration or S-configuration. In certain embodiments, in a compound of Formula (10a)

[chemical structure]

the chiral atom labeled with * at carbon 10 is of the R-configuration and a chiral atom labeled with ** at carbon 6 is of the R-configuration. In certain embodiments, a compound of Formula (10a)

[chemical structure]

is of the formula:

[chemical structure]

In certain embodiments, in a compound of Formula (10a)

[chemical structure]

the chiral atom labeled with * at carbon 10 is of the S-configuration and a chiral atom labeled with ** at carbon 6 is of the S-configuration. In certain embodiments, a compound of Formula (10a)

[chemical structure]

is of the formula:

[chemical structure]

[0349] In some embodiments, a compound of Formula (X-A) is:

[chemical structure]

[0350] In some embodiments, a compound of Formula (X-A) is:

[chemical structure]

[0351] In some embodiments a compound of Formula (X-B) is:

[chemical structure]

[0352] In certain embodiments, a compound of Formula (9)

[chemical structure]

has a chiral atom labeled with * at carbon 3 and a chiral atom labeled with ** at carbon 4. In certain embodiments, in a compound of Formula (9)

[chemical structure]

the chiral atom labeled with * at carbon 3 is of the R-configuration or S-configuration; and a chiral atom labeled with ** at carbon 4 is of the R-configuration. In certain embodiments, in a compound of Formula (9)

[chemical structure]

the chiral atom labeled with * at carbon 3 is of the S-configuration; and a chiral atom labeled with ** at carbon 4 is of the R-configuration or S-configuration. In certain embodiments, in a compound of Formula (9)

[chemical structure]

the chiral atom labeled with * at carbon 3 is of the R-configuration and a chiral atom labeled with ** at carbon 4 is of the R-configuration. In certain embodiments, a compound of Formula (9)

[chemical structure]

is of the formula:

[chemical structure]

In certain embodiments, in a compound of Formula (9)

[chemical structure]

the chiral atom labeled with * at carbon 3 is of the S-configuration and a chiral atom labeled with ** at carbon 4 is of the S-configuration. In certain embodiments, a compound of Formula (9)

[chemical structure]

is of the formula:

[chemical structure]

[0353] In certain embodiments, a compound of Formula (9a) (CBDA)

[chemical structure]

has a chiral atom labeled with * at carbon 3 and a chiral atom labeled with ** at carbon 4. In certain embodiments, in a compound of Formula (9a)

[chemical structure]

the chiral atom labeled with * at carbon 3 is of the R-configuration or S-configuration; and a chiral atom labeled with ** at carbon 4 is of the R-configuration. In certain embodiments, in a compound of Formula (9a)

[chemical structure]

the chiral atom labeled with * at carbon 3 is of the S-configuration; and a chiral atom labeled with ** at carbon 4 is of the R-configuration or S-configuration. In certain embodiments, in a compound of Formula (9a)

[chemical structure]

the chiral atom labeled with * at carbon 3 is of the R-configuration and a chiral atom labeled with ** at carbon 4 is of the R-configuration. In certain embodiments, a compound of Formula (9a)

[chemical structure]

is of the formula:

[chemical structure]

In certain embodiments, in a compound of Formula (9a)

[chemical structure]

the chiral atom labeled with * at carbon 3 is of the S-configuration and a chiral atom labeled with ** at carbon 4 is of the S-configuration. In certain embodiments, a compound of Formula (9a)

[chemical structure]

is of the formula:

[chemical structure]

[0354] In some embodiments, as shown in FIG. 2, a TS is capable of producing a cannabinoid from the product of a PT, including, without limitation, an enzyme capable of producing a compound of Formula (9), (10), or (11):

[chemical structure]

or a pharmaceutically acceptable salt, solvate, hydrate, polymorph, co-crystal, tautomer, stereoisomer, isotopically labeled derivative, or prodrug thereof, wherein R is hydrogen, optionally substituted acyl, optionally substituted alkyl, optionally substituted alkenyl, optionally substituted alkynyl, optionally substituted carbocyclyl, or optionally substituted aryl; produced from a compound of Formula (8′):

[chemical structure]

wherein a is 1, 2, 3, 4, 5, 6, 7, 8, 9, or 10; and R is hydrogen, optionally substituted acyl, optionally substituted alkyl, optionally substituted alkenyl, optionally substituted alkynyl, optionally substituted carbocyclyl, or optionally substituted aryl; or using any other substrate. In certain embodiments, a compound of Formula (8′) is a compound of Formula (8):

[chemical structure]

[0355] In certain embodiments, a compound of Formula (9), (10), or (11) is produced using a TS from a substrate compound of Formula (8′) (e.g., compound of Formula (8)), for example. Non-limiting examples of substrate compounds of Formula (8′) include but are not limited to cannabigerolic acid (CBGA), cannabigerovarinic acid (CBGVA), or cannabinerolic acid. In certain embodiments, at least one of the hydroxyl groups of the product compounds of Formula (9), (10), or (11) is further methylated. In certain embodiments, a compound of Formula (9) is methylated to form a compound of Formula (12):

[chemical structure]

or a pharmaceutically acceptable salt, solvate, hydrate, polymorph, co-crystal, tautomer, stereoisomer, isotopically labeled derivative, or prodrug thereof.

### Tetrahydrocannabinolic Acid Synthase (THCAS)

[0356] A host cell described in this application may comprise a TS that is a tetrahydrocannabinolic acid synthase (THCAS). As used in this application “tetrahydrocannabinolic acid synthase (THCAS)” or “Δ¹-tetrahydrocannabinolic acid (THCA) synthase” refers to an enzyme that is capable of catalyzing oxidative cyclization of a prenyl moiety (e.g., terpene) of a compound of Formula (8) to produce a ring-containing product (e.g., heterocyclic ring-containing product, carbocyclic-ring containing product) of Formula (10). In certain embodiments, a THCAS refers to an enzyme that is capable of producing Δ9-tetrahydrocannabinolic acid (Δ9-THCA, THCA, Δ9-Tetrahydro-cannabivarinic acid A (Δ9-THCVA-C3 A), THCVA, THCP, or a compound of Formula 10(a), from a compound of Formula (8). In certain embodiments, a THCAS is capable of producing Δ⁹-tetrahydrocannabinolic acid (Δ⁹-THCA, THCA, or a compound of Formula 10(a)). In certain embodiments, a THCAS is capable of producing Δ9-tetrahydrocannabivarinic acid (Δ9-THCVA, THCVA, or a compound of Formula 10 where R is n-propyl).

[0357] In some embodiments, a THCAS may catalyze the oxidative cyclization of substrates, such as 3-prenyl-2,4-dihydroxy-6-alkylbenzoic acids. In some embodiments, a THCAS may use cannabigerolic acid (CBGA) as a substrate. In some embodiments, the THCAS produces A9-THCA from CBGA. In some embodiments, a THCAS may catalyze the oxidative cyclization of cannabigerovarinic acid (CBGVA). In some embodiments, a THCAS exhibits specificity for CBGA substrates as compared to other substrates. In some embodiments, a THCAS may use a compound of Formula (8) of FIG. 2 where R is C4 alkyl (e.g., n-butyl) or R is C7 alkyl (e.g., n-heptyl) as a substrate. In some embodiments, a THCAS may use a compound of Formula (8) where R is C4 alkyl (e.g., n-butyl) as a substrate. In some embodiments, a THCAS may use a compound of Formula (8) of FIG. 2 where R is C7 alkyl (e.g., n-heptyl) as a substrate. In some embodiments, the THCAS exhibits specificity for substrates that can result in THCP as a product.

[0358] In some embodiments, a THCAS is from C. sativa. C. sativa THCAS performs the oxidative cyclization of the geranyl moiety of Cannabigerolic Acid (CBGA) (FIG. 4 Structure 8a) to form Tetrahydrocannabinolic Acid (FIG. 4 Structure 10a) using covalently bound flavin adenine dinucleotide (FAD) as a cofactor and molecular oxygen as the final electron acceptor. THCAS was first discovered and characterized by Taura et al. (JACS. 1995) following extraction of the enzyme from the leaf buds of C. sativa and confirmation of its THCA synthase activity in vitro upon the addition of CBGA as a substrate. Additional analysis indicated that the enzyme is a monomer and possesses FAD binding and Berberine Bridge Enzyme (BBE) sequence motifs. A crystal structure of the enzyme published by Shoyama et al. (J Mol Biol. 2012 Oct. 12; 423(1):96-105) revealed that the enzyme covalently binds to a molecule of the cofactor FAD. See also, e.g., Sirikantarams et al., J. Biol. Chem. 2004 September 17; 279(38):39767-39774. There are several THCAS isozymes in Cannabis sativa.

[0359] In some embodiments, a C. sativa THCAS (Uniprot KB Accession No.: I1V0C5) comprises the amino acid sequence shown below, in which the signal peptide is underlined and bolded:

(SEQ ID NO: 13)
MNCSAFSFWFVCKIIFFFLSFNIQISIANPQENFLKCFSEYIPNNPANPK
FIYTQHDQLYMSVLNSTIQNLRFTSDTTPKPLVIVTPSNVSHIQASILCS
KKVGLQIRTRSGGHDAEGMSYISQVPFVVVDLRNMHSIKIDVHSQTAWVE
AGATLGEVYYWINEKNENFSFPGGYCPTVGVGGHFSGGGYGALMRNYGLA
ADNIIDAHLVNVDGKVLDRKSMGEDLFWAIRGGGGENFGIIAAWKIKLVA
VPSKSTIFSVKKNMEIHGLVKLFNKWQNIAYKYDKDLVLMTHFITKNITD
NHGKNKTTVHGYFSSIFHGGVDSLVDLMNKSFPELGIKKTDCKEFSWIDT
TIFYSGVVNFNTANFKKEILLDRSAGKKTAFSIKLDYVKKPIPETAMVKI
LEKLYEEDVGVGMYVLYPYGGIMEEISESAIPFPHRAGIMYELWYTASWE
KQEDNEKHINWVRSVYNFTTPYVSQNPRLAYLNYRDLDLGKTNPESPNNY
TQARIWGEKYFGKNFNRLVKVKTKADPNNFFRNEQSIPPLPPHHH.

[0360] In some embodiments, a THCAS comprises the sequence shown below:

(SEQ ID NO: 14)
NPQENFLKCFSEYIPNNPANPKFIYTQHDQLYMSVLNSTIQNLRFTSDTT
PKPLVIVTPSNVSHIQASILCSKKVGLQIRTRSGGHDAEGMSYISQVPFV
VVDLRNMHSIKIDVHSQTAWVEAGATLGEVYYWINEKNENFSFPGGYCPT
VGVGGHFSGGGYGALMRNYGLAADNIIDAHLVNVDGKVLDRKSMGEDLFW
AIRGGGGENFGIIAAWKIKLVAVPSKSTIFSVKKNMEIHGLVKLFNKWQN
IAYKYDKDLVLMTHFITKNITDNHGKNKTTVHGYFSSIFHGGVDSLVDLM
NKSFPELGIKKTDCKEFSWIDTTIFYSGVVNFNTANFKKEILLDRSAGKK
TAFSIKLDYVKKPIPETAMVKILEKLYEEDVGVGMYVLYPYGGIMEEISE
SAIPFPHRAGIMYELWYTASWEKQEDNEKHINWVRSVYNFTTPYVSQNPR
LAYLNYRDLDLGKTNPESPNNYTQARIWGEKYFGKNFNRLVKVKTKADPN
NFFRNEQSIPPLPPHHH.

[0361] A non-limiting example of a nucleotide sequence encoding SEQ ID NO: 14 is:

(SEQ ID NO: 15)
aacccgcaagaaaactttctaaaatgcttttctgaatacattcctaacaa
ccctgccaacccgaagtttatctacacacaacacgatcaattgtatatga
gcgtgttgaatagtacaatacagaacctgaggtttacatccgacacaacg
ccgaaaccgctagtgatcgtcacaccctccaacgtaagccacattcaggc
aagcattttatgcagcaagaaagtcggactgcagataaggacgaggtccg
gaggacacgacgccgaagggatgagctatatctcccaggtaccttttgtg
gtggtagacttgagaaatatgcactctatcaagatagacgttcactccca
aaccgcttgggttgaggcgggagccacccttggtgaggtctactactgga
tcaacgaaaagaatgaaaattttagctttcctgggggatattgcccaact
gtaggtgttggcggccacttctcaggaggcggttatggggccttgatgcg
taactacggacttgcggccgacaacattatagacgcacatctagtgaatg
tagacggcaaagttttagacaggaagagcatgggtgaggatcttttttgg
gcaattagaggcggagggggagaaaattttggaattatcgctgcttggaa
aattaagctagttgcggtaccgagcaaaagcactatattctctgtaaaaa
agaacatggagatacatggtttggtgaagctttttaataagtggcaaaac
atcgcgtacaagtacgacaaagatctggttctgatgacgcattttataac
gaaaaatatcaccgacaaccacggaaaaaacaaaaccacagtacatggct
acttctctagtatatttcatgggggagtcgattctctggttgatttaatg
aacaaatcattcccagagttgggtataaagaagacagactgtaaggagtt
ctcttggattgacacaactatattctattcaggcgtagtcaactttaaca
cggcgaatttcaaaaaagagatccttctggacagatccgcaggtaagaaa
actgcgttctctatcaaattggactatgtgaagaagcctattcccgaaac
cgcgatggtcaagatacttgagaaattatacgaggaagatgtgggagttg
gaatgtacgtactttatccctatggtgggataatggaagaaatcagcgag
agcgccattccatttccccatcgtgccggcatcatgtacgagctgtggta
tactgcgagttgggagaagcaagaagacaacgaaaagcacattaactggg
tcagatcagtttacaatttcaccaccccatacgtgtcccagaatccgcgt
ctggcttacttgaactaccgtgatcttgacctgggtaaaacgaacccgga
gtcacccaacaattacactcaagctagaatctggggagagaaatactttg
ggaagaacttcaacaggttagtaaaggttaaaaccaaggcagatccaaac
aacttttttagaaatgaacaatccattcccccgctacccccgcaccatca
c.

[0362] In some embodiments, a C. sativa THCAS comprises the amino acid sequence set forth in UniProtKB-Q8GTB6 (SEQ ID NO: 16):

MNCSAFSFWFVCKIIFFFLSFHIQISIANPRENFLKCFSKHIPNNVANPK
LVYTQHDQLYMSILNSTIQNLRFISDTTPKPLVIVTPSNNSHIQATILCS
KKVGLQIRTRSGGHDAEGMSYISQVPFVVVDLRNMHSIKIDVHSQTAWVE
AGATLGEVYYWINEKNENLSFPGGYCPTVGVGGHFSGGGYGALMRNYGLA
ADNIIDAHLVNVDGKVLDRKSMGEDLFWAIRGGGGENFGIIAAWKIKLVA
VPSKSTIFSVKKNMEIHGLVKLFNKWQNIAYKYDKDLVLMTHFITKNITD
NHGKNKTTVHGYFSSIFHGGVDSLVDLMNKSFPELGIKKTDCKEFSWIDT
TIFYSGVVNFNTANFKKEILLDRSAGKKTAFSIKLDYVKKPIPETAMVKI
LEKLYEEDVGAGMYVLYPYGGIMEEISESAIPFPHRAGIMYELWYTASWE
KQEDNEKHINWVRSVYNFTTPYVSQNPRLAYLNYRDLDLGKTNHASPNNY
TQARIWGEKYFGKNFNRLVKVKTKVDPNNFFRNEQSIPPLPPHHH.

[0363] Additional non-limiting examples of THCAS enzymes may also be found in U.S. Pat. No. 9,512,391 and U.S. Patent Application Publication No. 2018/0179564, which are incorporated by reference in this application in their entireties.

Cannabidiolic acid synthase (CBDAS)

[0364] A host cell described in this application may comprise a TS that is a cannabidiolic acid synthase (CBDAS). As used in this application, a “CBDAS” refers to an enzyme that is capable of catalyzing oxidative cyclization of a prenyl moiety (e.g., terpene) of a compound of Formula (8) to produce a compound of Formula (9). In some embodiments, a compound of Formula 9 is a compound of Formula (9a) (cannabidiolic acid (CBDA)), CBDVA, or CBDP. A CBDAS may use cannabigerolic acid (CBGA) or cannabinerolic acid as a substrate. In some embodiments, a cannabidiolic acid synthase is capable of oxidative cyclization of cannabigerolic acid (CBGA) to produce cannabidiolic acid (CBDA). In some embodiments, the CBDAS may catalyze the oxidative cyclization of other substrates, such as 3-geranyl-2,4-dihydro-6-alkylbenzoic acids like cannabigerovarinic acid (CBGVA) or a substrate of Formula (8) with R as a C7 alkyl (heptyl) group (cannabigerophorolic acid (CBGPA)). In some embodiments, the CBDAS exhibits specificity for CBGA substrates.

[0365] In some embodiments, a CBDAS is from Cannabis. In C. sativa, CBDAS is encoded by the CBDAS gene and is a flavoenzyme. A non-limiting example of a CBDAS is provided by UniProtKB-A6P6V9 (SEQ ID NO: 17) from C. sativa:

MKCSTFSFWFVCKIIFFFFSFNIQTSIANPRENFLKCFSQYIPNNATNLK
LVYTQNNPLYMSVLNSTIHNLRFTSDTTPKPLVIVTPSHVSHIQGTILCS
KKVGLQIRTRSGGHDSEGMSYISQVPFVIVDLRNMRSIKIDVHSQTAWVE
AGATLGEVYYWVNEKNENLSLAAGYCPTVCAGGHFGGGGYGPLMRNYGLA
ADNIIDAHLVNVHGKVLDRKSMGEDLFWALRGGGAESFGIIVAWKIRLVA
VPKSTMFSVKKIMEIHELVKLVNKWQNIAYKYDKDLLLMTHFITRNITDN
QGKNKTAIHTYFSSVFLGGVDSLVDLMNKSFPELGIKKTDCRQLSWIDTI
IFYSGVVNYDTDNFNKEILLDRSAGQNGAFKIKLDYVKKPIPESVFVQIL
EKLYEEDIGAGMYALYPYGGIMDEISESAIPFPHRAGILYELWYICSWEK
QEDNEKHLNWIRNIYNFMTPYVSKNPRLAYLNYRDLDIGINDPKNPNNYT
QARIWGEKYFGKNFDRLVKVKTLVDPNNFFRNEQSIPPLPRHRH.

[0366] Additional non-limiting examples of CBDAS enzymes may also be found in U.S. Pat. No. 9,512,391 and U.S. Patent Application Publication No. 2018/0179564, which are incorporated by reference in this application in their entireties.

### Cannabichromenic Acid Synthase (CBCAS)

[0367] A host cell described in this application may comprise a TS that is a cannabichromenic acid synthase (CBCAS). As used in this application, a “CBCAS” refers to an enzyme that is capable of catalyzing oxidative cyclization of a prenyl moiety (e.g., terpene) of a compound of Formula (8) to produce a compound of Formula (11). In some embodiments, a compound of Formula (11) is a compound of Formula (11a) (cannabichromenic acid (CBCA)), CBCVA, or a compound of Formula (8) with R as a C7 alkyl (heptyl) group. A CBCAS may use cannabigerolic acid (CBGA) as a substrate. In some embodiments, a CBCAS produces cannabichromenic acid (CBCA) from cannabigerolic acid (CBGA). In some embodiments, the CBCAS may catalyze the oxidative cyclization of other substrates, such as 3-geranyl-2,4-dihydro-6-alkylbenzoic acids like cannabigerovarinic acid (CBGVA), or a substrate of Formula (8) with R as a C7 alkyl (heptyl) group. In some embodiments, the CBCAS exhibits specificity for CBGA substrates.

[0368] In some embodiments, a CBCAS is from Cannabis. In C. sativa, an amino acid sequence encoding CBCAS is provided by, and incorporated by reference from, SEQ ID NO:2 disclosed in U.S. Patent Publication No. 2017/0211049. In other embodiments, a CBCAS may be a THCAS described in and incorporated by reference from U.S. Pat. No. 9,359,625. SEQ ID NO:2 disclosed in U.S. Patent Application Publication No. 2017/0211049 (corresponding to SEQ ID NO: 4 in this application) has the amino acid sequence:

MNCSTFSFWFVCKIIFFFLSFNIQISIANPQENFLKCFSEYIPNNPANPK
FIYTQHDQLYMSVLNSTIQNLRFTSDTTPKPLVIVTPSNVSHIQASILCS
KKVGLQIRTRSGGHDAEGLSYISQVPFAIVDLRNMHTVKVDIHSQTAWVE
AGATLGEVYYWINEMNENFSFPGGYCPTVGVGGHFSGGGYGALMRNYGLA
ADNIIDAHLVNVDGKVLDRKSMGEDLFWAIRGGGGENFGIIAACKIKLVV
VPSKATIFSVKKNMEIHGLVKLFNKWQNIAYKYDKDLMLTTHFRTRNITD
NHGKNKTTVHGYFSSIFLGGVDSLVDLMNKSFPELGIKKTDCKELSWIDT
TIFYSGVVNYNTANFKKEILLDRSAGKKTAFSIKLDYVKKLIPETAMVKI
LEKLYEEEVGVGMYVLYPYGGIMDEISESAIPFPHRAGIMYELWYTATWE
KQEDNEKHINWVRSVYNFTTPYVSQNPRLAYLNYRDLDLGKTNPESPNNY
TQARIWGEKYFGKNFNRLVKVKTKADPNNFFRNEQSIPPLPPRHH.

[0369] Additional CBCASs are disclosed in and incorporated by reference from PCT/US21/24398.

### Variants

[0370] Aspects of the disclosure relate to nucleic acids encoding any of the polypeptides (e.g., AAE, PKS, PKC, PT, or TS) described in this application. In some embodiments, a nucleic acid encompassed by the disclosure is a nucleic acid that hybridizes under high or medium stringency conditions to a nucleic acid encoding an AAE, PKS, PKC, PT, or TS and is biologically active. For example, high stringency conditions of 0.2 to 1×SSC at 65° C. followed by a wash at 0.2×SSC at 65° C. can be used. In some embodiments, a nucleic acid encompassed by the disclosure is a nucleic acid that hybridizes under low stringency conditions to a nucleic acid encoding an AAE, PKS, PKC, PT, or TS and is biologically active. For example, low stringency conditions of 6×SSC at room temperature followed by a wash at 2×SSC at room temperature can be used. Other hybridization conditions include 3×SSC at 40 or 50° C., followed by a wash in 1 or 2×SSC at 20, 30, 40, 50, 60, or 65° C.

[0371] Hybridizations can be conducted in the presence of formaldehyde, e.g., 10%, 20%, 30% 40% or 50%, which further increases the stringency of hybridization. Theory and practice of nucleic acid hybridization is described, e.g., in S. Agrawal (ed.) Methods in Molecular Biology, volume 20; and Tijssen (1993) Laboratory Techniques in biochemistry and molecular biology-hybridization with nucleic acid probes, e.g., part I chapter 2 “Overview of principles of hybridization and the strategy of nucleic acid probe assays,” Elsevier, New York provide a basic guide to nucleic acid hybridization.

[0372] Variants of enzyme sequences described in this application (e.g., AAE, PKS, PKC, PT, or TS, including nucleic acid or amino acid sequences) are also encompassed by the present disclosure. A variant may share at least 5%, at least 10%, at least 15%, at least 20%, at least 25%, at least 30%, at least 35%, at least 40%, at least 45%, at least 50%, at least 55%, at least 60%, at least 65%, at least 70%, at least 71%, at least 72%, at least 73%, at least 74%, at least 75%, at least 76%, at least 77%, at least 78%, at least 79%, at least 80%, at least 81%, at least 82%, at least 83%, at least 84%, at least 85%, at least 86%, at least 87%, at least 88%, at least 89%, at least 90%, at least 91%, at least 92%, at least 93%, at least 94%, at least 95%, at least 96%, at least 97%, at least 98%, at least 99%, or 100% sequence identity with a reference sequence, including all values in between.

[0373] Unless otherwise noted, the term “sequence identity,” which is used interchangeably in this disclosure with the term “percent identity,” as known in the art, refers to a relationship between the sequences of two polypeptides or polynucleotides, as determined by sequence comparison (alignment). In some embodiments, sequence identity is determined across the entire length of a sequence (e.g., AAE, PKS, PKC, PT, or TS sequence). In some embodiments, sequence identity is determined over a region (e.g., a stretch of amino acids or nucleic acids, e.g., the sequence spanning an active site) of a sequence (e.g., AAE, PKS, PKC, PT, or TS sequence). For example, in some embodiments, sequence identity is determined over a region corresponding to at least 30%, at least 40%, at least 50%, at least 60%, at least 70%, at least 80%, at least 90%, at least 95%, or over 100% of the length of the reference sequence.

[0374] Identity measures the percent of identical matches between the smaller of two or more sequences with gap alignments (if any) addressed by a particular mathematical model, algorithm, or computer program.

[0375] Identity of related polypeptides or nucleic acid sequences can be readily calculated by any of the methods known to one of ordinary skill in the art. The percent identity of two sequences (e.g., nucleic acid or amino acid sequences) may, for example, be determined using the algorithm of Karlin and Altschul Proc. Natl. Acad. Sci. USA 87:2264-68, 1990, modified as in Karlin and Altschul Proc. Natl. Acad. Sci. USA 90:5873-77, 1993. Such an algorithm is incorporated into the NBLAST® and XBLAST® programs (version 2.0) of Altschul et al., J. Mol. Biol. 215:403-10, 1990. BLAST® protein searches can be performed, for example, with the XBLAST program, score=50, wordlength=3 to obtain amino acid sequences homologous to the proteins described in this application. Where gaps exist between two sequences, Gapped BLAST® can be utilized, for example, as described in Altschul et al., Nucleic Acids Res. 25(17):3389-3402, 1997. When utilizing BLAST® and Gapped BLAST® programs, the default parameters of the respective programs (e.g., XBLAST® and NBLAST®) can be used, or the parameters can be adjusted appropriately as would be understood by one of ordinary skill in the art.

[0376] Another local alignment technique which may be used, for example, is based on the Smith-Waterman algorithm (Smith, T. F. & Waterman, M. S. (1981) “Identification of common molecular subsequences.” J. Mol. Biol. 147:195-197). A general global alignment technique which may be used, for example, is the Needleman-Wunsch algorithm (Needleman, S. B. & Wunsch, C. D. (1970) “A general method applicable to the search for similarities in the amino acid sequences of two proteins.” J. Mol. Biol. 48:443-453), which is based on dynamic programming.

[0377] More recently, a Fast Optimal Global Sequence Alignment Algorithm (FOGSAA) was developed that purportedly produces global alignment of nucleic acid and amino acid sequences faster than other optimal global alignment methods, including the Needleman-Wunsch algorithm. In some embodiments, the identity of two polypeptides is determined by aligning the two amino acid sequences, calculating the number of identical amino acids, and dividing by the length of one of the amino acid sequences. In some embodiments, the identity of two nucleic acids is determined by aligning the two nucleotide sequences and calculating the number of identical nucleotide and dividing by the length of one of the nucleic acids.

[0378] For multiple sequence alignments, computer programs including Clustal Omega (Sievers et al., Mol Syst Biol. 2011 Oct. 11; 7:539) may be used.

[0379] In preferred embodiments, a sequence, including a nucleic acid or amino acid sequence, is found to have a specified percent identity to a reference sequence, such as a sequence disclosed in this application and/or recited in the claims when sequence identity is determined using the algorithm of Karlin and Altschul Proc. Natd. Acad. Sci. USA 87:2264-68, 1990, modified as in Karlin and Altschul Proc. Natd. Acad. Sci. USA 90:5873-77, 1993 (e.g., BLAST®, NBLAST®, XBLAST® or Gapped BLAST® programs, using default parameters of the respective programs).

[0380] In some embodiments, a sequence, including a nucleic acid or amino acid sequence, is found to have a specified percent identity to a reference sequence, such as a sequence disclosed in this application and/or recited in the claims when sequence identity is determined using the Smith-Waterman algorithm (Smith, T. F. & Waterman, M. S. (1981) “Identification of common molecular subsequences.” J. Mol. Biol. 147:195-197) or the Needleman-Wunsch algorithm (Needleman, S. B. & Wunsch, C. D. (1970) “A general method applicable to the search for similarities in the amino acid sequences of two proteins.” J. Mol. Biol. 48:443-453) using default parameters.

[0381] In some embodiments, a sequence, including a nucleic acid or amino acid sequence, is found to have a specified percent identity to a reference sequence, such as a sequence disclosed in this application and/or recited in the claims when sequence identity is determined using a Fast Optimal Global Sequence Alignment Algorithm (FOGSAA) using default parameters.

[0382] In some embodiments, a sequence, including a nucleic acid or amino acid sequence, is found to have a specified percent identity to a reference sequence, such as a sequence disclosed in this application and/or recited in the claims when sequence identity is determined using Clustal Omega (Sievers et al., Mol Syst Biol. 2011 Oct. 11; 7:539) using default parameters.

[0383] As used in this application, a residue (such as a nucleic acid residue or an amino acid residue) in sequence “X” is referred to as corresponding to a position or residue (such as a nucleic acid residue or an amino acid residue) “Z” in a different sequence “Y” when the residue in sequence “X” is at the counterpart position of “Z” in sequence “Y” when sequences X and Y are aligned using amino acid sequence alignment tools known in the art.

[0384] As used in this application, variant sequences may be homologous sequences. As used in this application, homologous sequences are sequences (e.g., nucleic acid or amino acid sequences) that share a certain percent identity (e.g., at least 5%, at least 10%, at least 15%, at least 20%, at least 25%, at least 30%, at least 35%, at least 40%, at least 45%, at least 50%, at least 55%, at least 60%, at least 65%, at least 70%, at least 71%, at least 72%, at least 73%, at least 74%, at least 75%, at least 76%, at least 77%, at least 78%, at least 79%, at least 80%, at least 81%, at least 82%, at least 83%, at least 84%, at least 85%, at least 86%, at least 87%, at least 88%, at least 89%, at least 90%, at least 91%, at least 92%, at least 93%, at least 94%, at least 95%, at least 96%, at least 97%, at least 98%, at least 99%, or 100% percent identity, including all values in between). Homologous sequences include but are not limited to paralogous or orthologous sequences. Paralogous sequences arise from duplication of a gene within a genome of a species, while orthologous sequences diverge after a speciation event.

[0385] In some embodiments, a polypeptide variant (e.g., AAE, PKS, PKC, PT, or TS enzyme variant) comprises a domain that shares a secondary structure (e.g., alpha helix, beta sheet) with a reference polypeptide (e.g., a reference AAE, PKS, PKC, PT, or TS enzyme). In some embodiments, a polypeptide variant (e.g., AAE, PKS, PKC, PT, or TS enzyme variant) shares a tertiary structure with a reference polypeptide (e.g., a reference AAE, PKS, PKC, PT, or TS enzyme). As a non-limiting example, a polypeptide variant (e.g., AAE, PKS, PKC, PT, or TS enzyme) may have low primary sequence identity (e.g., less than 80%, less than 75%, less than 70%, less than 65%, less than 60%, less than 55%, less than 50%, less than 45%, less than 40%, less than 35%, less than 30%, less than 25%, less than 20%, less than 15%, less than 10%, or less than 5% sequence identity) compared to a reference polypeptide, but share one or more secondary structures (e.g., including but not limited to loops, alpha helices, or beta sheets), or have the same tertiary structure as a reference polypeptide. For example, a loop may be located between a beta sheet and an alpha helix, between two alpha helices, or between two beta sheets. Homology modeling may be used to compare two or more tertiary structures.

[0386] Functional variants of the recombinant AAE, PKS, PKC, PT, or TS enzyme disclosed in this application are encompassed by the present disclosure. For example, functional variants may bind one or more of the same substrates or produce one or more of the same products. Functional variants may be identified using any method known in the art. For example, the algorithm of Karlin and Altschul Proc. Natl. Acad. Sci. USA 87:2264-68, 1990 described above may be used to identify homologous proteins with known functions.

[0387] Putative functional variants may also be identified by searching for polypeptides with functionally annotated domains. Databases including Pfam (Sonnhammer et al., Proteins. 1997 July;28(3):405-20) may be used to identify polypeptides with a particular domain.

[0388] Homology modeling may also be used to identify amino acid residues that are amenable to mutation (e.g., substitution, deletion, and/or insertion) without affecting function. A non-limiting example of such a method may include use of position-specific scoring matrix (PSSM) and an energy minimization protocol.

[0389] Position-specific scoring matrix (PSSM) uses a position weight matrix to identify consensus sequences (e.g., motifs). PSSM can be conducted on nucleic acid or amino acid sequences. Sequences are aligned and the method takes into account the observed frequency of a particular residue (e.g., an amino acid or a nucleotide) at a particular position and the number of sequences analyzed. See, e.g., Stormo et al., Nucleic Acids Res. 1982 May 11;10(9):2997-3011. The likelihood of observing a particular residue at a given position can be calculated. Without being bound by a particular theory, positions in sequences with high variability may be amenable to mutation (e.g., substitution, deletion, and/or insertion; e.g., PSSM score≥0) to produce functional homologs.

[0390] PSSM may be paired with calculation of a Rosetta energy function, which determines the difference between the wild-type and the single-point mutant. The Rosetta energy function calculates this difference as (ΔΔ_{calc}). With the Rosetta function, the bonding interactions between a mutated residue and the surrounding atoms are used to determine whether an amino acid substitution, deletion, or insertion increases or decreases protein stability. For example, an amino acid substitution, deletion, or insertion that is designated as favorable by the PSSM score (e.g. PSSM score≥0), can then be analyzed using the Rosetta energy function to determine the potential impact of the mutation on protein stability. Without being bound by a particular theory, potentially stabilizing mutations are desirable for protein engineering (e.g., production of functional homologs). In some embodiments, a potentially stabilizing mutation has a ΔΔ_{calc} value of less than −0.1 (e.g., less than −0.2, less than −0.3, less than −0.35, less than −0.4, less than −0.45, less than −0.5, less than −0.55, less than −0.6, less than −0.65, less than −0.7, less than −0.75, less than −0.8, less than −0.85, less than −0.9, less than −0.95, or less than −1.0) Rosetta energy units (R.e.u.). See, e.g., Goldenzweig et al., Mol Cell. 2016 Jul. 21; 63(2):337-346. Doi: 10.1016/j.molcel.2016.06.012.

[0391] In some embodiments, an AAE, PKS, PKC, PT, or TS coding sequence comprises a mutation at 1, 2, 3, 4, 5, 6, 7, 8, 9, 10, 11, 12, 13, 14, 15, 16, 17, 18, 19, 20, 21, 22, 23, 24, 25, 26, 27, 28, 29, 30, 31, 32, 33, 34, 35, 36, 37, 38, 39, 40, 41, 42, 43, 44, 45, 46, 47, 48, 49, 50, 51, 52, 53, 54, 55, 56, 57, 58, 59, 60, 61, 62, 63, 64, 65, 66, 67, 68, 69, 70, 71, 72, 73, 74, 75, 76, 77, 78, 79, 80, 81, 82, 83, 84, 85, 86, 87, 88, 89, 90, 91, 92, 93, 94, 95, 96, 97, 98, 99, 100 or more than 100 positions relative to a reference (e.g., AAE, PKS, PKC, PT, or TS) coding sequence. In some embodiments, the AAE, PKS, PKC, PT, or TS coding sequence comprises a mutation in 1, 2, 3, 4, 5, 6, 7, 8, 9, 10, 11, 12, 13, 14, 15, 16, 17, 18, 19, 20, 21, 22, 23, 24, 25, 26, 27, 28, 29, 30, 31, 32, 33, 34, 35, 36, 37, 38, 39, 40, 41, 42, 43, 44, 45, 46, 47, 48, 49, 50, 51, 52, 53, 54, 55, 56, 57, 58, 59, 60, 61, 62, 63, 64, 65, 66, 67, 68, 69, 70, 71, 72, 73, 74, 75, 76, 77, 78, 79, 80, 81, 82, 83, 84, 85, 86, 87, 88, 89, 90, 91, 92, 93, 94, 95, 96, 97, 98, 99, 100 or more codons of the coding sequence relative to a reference (e.g., AAE, PKS, PKC, PT, or TS) coding sequence. As will be understood by one of ordinary skill in the art, a mutation within a codon may or may not change the amino acid that is encoded by the codon due to degeneracy of the genetic code. In some embodiments, the one or more mutations in the coding sequence do not alter the amino acid sequence of the coding sequence (e.g., AAE, PKS, PKC, PT, or TS) relative to the amino acid sequence of a reference polypeptide (e.g., AAE, PKS, PKC, PT, or TS).

[0392] It should be appreciated that sequences disclosed herein may or may not contain signal sequences. The sequences disclosed herein encompass versions with or without signal sequences.

[0393] It should also be understood that protein sequences disclosed herein may be depicted with or without a start codon (M). Accordingly, in some instances amino acid numbering may correspond to protein sequences containing a start codon, while in other instances, amino acid numbering may correspond to protein sequences that do not contain a start codon. As a non-limiting example, a PKC may comprise residues 1-X of SEQ ID NOs: 1, 19-106 196-388, 582-669, 671-742, or 745-948, or an amino acid sequence in Table 11, in which X is the last amino acid of the reference sequence. As a non-limiting example, a PKC may comprise residues 2-X of SEQ ID NOs: 1, 19-106 196-388, 582-669, 671-742, or 745-948 or an amino acid sequence in Table 11, in which X is the last amino acid of the reference sequence. Where a PKC comprise residues 2-X of SEQ ID NOs: 1, 19-106, or 196-388, 582-669, 671-742, or 745-948 or an amino acid sequence in Table 11, such PKC may, for example, be used with a signal sequence. Aspects of the disclosure encompass host cells comprising any of the sequences described herein, including the sequences within Table 11 and fragments thereof.

[0394] In some embodiments, the one or more mutations in a recombinant coding sequence (e.g., AAE, PKS, PKC, PT, or TS coding sequence) do alter the amino acid sequence of the corresponding polypeptide (e.g., AAE, PKS, PKC, PT, or TS) relative to the amino acid sequence of a reference polypeptide (e.g., AAE, PKS, PKC, PT, or TS). In some embodiments, the one or more mutations alters the amino acid sequence of the polypeptide (e.g., AAE, PKS, PKC, PT, or TS) relative to the amino acid sequence of a reference polypeptide (e.g., AAE, PKS, PKC, PT, or TS) and alters (enhances or reduces) an activity of the polypeptide relative to the reference polypeptide.

[0395] The activity (e.g., specific activity) of any of the recombinant polypeptides described in this application (e.g., AAE, PKS, PKC, PT, or TS) may be measured using routine methods. As a non-limiting example, a recombinant polypeptide's activity may be determined by measuring its substrate specificity, product(s) produced, the concentration of product(s) produced, or any combination thereof. As used in this application, “specific activity” of a recombinant polypeptide refers to the amount (e.g., concentration) of a particular product produced for a given amount (e.g., concentration) of the recombinant polypeptide per unit time.

[0396] The skilled artisan will also realize that mutations in a recombinant polypeptide (e.g., AAE, PKS, PKC, PT, or TS) coding sequence may result in conservative amino acid substitutions to provide functionally equivalent variants of the foregoing polypeptides, e.g., variants that retain the activities of the polypeptides. As used in this application, a “conservative amino acid substitution” refers to an amino acid substitution that does not alter the relative charge or size characteristics or functional activity of the protein in which the amino acid substitution is made.

[0397] In some instances, an amino acid is characterized by its R group (see, e.g., Table 3). For example, an amino acid may comprise a nonpolar aliphatic R group, a positively charged R group, a negatively charged R group, a nonpolar aromatic R group, or a polar uncharged R group. Non-limiting examples of an amino acid comprising a nonpolar aliphatic R group include alanine, glycine, valine, leucine, methionine, and isoleucine. Non-limiting examples of an amino acid comprising a positively charged R group includes lysine, arginine, and histidine. Non-limiting examples of an amino acid comprising a negatively charged R group include aspartate and glutamate. Non-limiting examples of an amino acid comprising a nonpolar, aromatic R group include phenylalanine, tyrosine, and tryptophan. Non-limiting examples of an amino acid comprising a polar uncharged R group include serine, threonine, cysteine, proline, asparagine, and glutamine.

[0398] Non-limiting examples of functionally equivalent variants of polypeptides may include conservative amino acid substitutions in the amino acid sequences of proteins disclosed in this application. As used in this application “conservative substitution” is used interchangeably with “conservative amino acid substitution” and refers to any one of the amino acid substitutions provided in Table 3.

[0399] In some embodiments, 1, 2, 3, 4, 5, 6, 7, 8, 9, 10, 11, 12, 13, 14, 15, 16, 17, 18, 19, 20 or more than 20 residues can be changed when preparing variant polypeptides. In some embodiments, amino acids are replaced by conservative amino acid substitutions. In some embodiments, amino acids are replaced by non-conservative amino acid substitutions.

TABLE 3
Conservative Amino Acid Substitutions

| | | Conservative Amino |
|---|---|---|
| Original Residue | R Group Type | Acid Substitutions |
| Ala | nonpolar aliphatic R group | Cys, Gly, Ser |
| Arg | positively charged R group | His, Lys |
| Asn | polar uncharged R group | Asp, Gln, Glu |
| Asp | negatively charged R group | Asn, Gln, Glu |
| Cys | polar uncharged R group | Ala, Ser |
| Gln | polar uncharged R group | Asn, Asp, Glu |
| Glu | negatively charged R group | Asn, Asp, Gln |
| Gly | nonpolar aliphatic R group | Ala, Ser |
| His | positively charged R group | Arg, Tyr, Trp |
| Ile | nonpolar aliphatic R group | Leu, Met, Val |
| Leu | nonpolar aliphatic R group | Ile, Met, Val |
| Lys | positively charged R group | Arg, His |
| Met | nonpolar aliphatic R group | Ile, Leu, Phe, Val |
| Pro | polar uncharged R group | |
| Phe | nonpolar aromatic R group | Met, Trp, Tyr |
| Ser | polar uncharged R group | Ala, Gly, Thr |
| Thr | polar uncharged R group | Ala, Asn, Ser |
| Trp | nonpolar aromatic R group | His, Phe, Tyr, Met |
| Tyr | nonpolar aromatic R group | His, Phe, Trp |
| Val | nonpolar aliphatic R group | Ile, Leu, Met, Thr |

[0400] Amino acid substitutions in the amino acid sequence of a polypeptide to produce a recombinant polypeptide (e.g., AAE, PKS, PKC, PT, or TS) variant having a desired property and/or activity can be made by alteration of the coding sequence of the polypeptide (e.g., AAE, PKS, PKC, PT, or TS). Similarly, conservative amino acid substitutions in the amino acid sequence of a polypeptide to produce functionally equivalent variants of the polypeptide typically are made by alteration of the coding sequence of the recombinant polypeptide (e.g., AAE, PKS, PKC, PT, or TS).

[0401] Mutations (e.g., substitutions, insertions, additions, or deletions) can be made in a nucleic acid sequence by a variety of methods known to one of ordinary skill in the art. For example, mutations (e.g., substitutions, insertions, additions, or deletions) can be made by PCR-directed mutation, site-directed mutagenesis according to the method of Kunkel (Kunkel, Proc. Nat. Acad. Sci. U.S.A. 82: 488-492, 1985), by chemical synthesis of a gene encoding a polypeptide, by CRISPR, or by insertions, such as insertion of a tag (e.g., a HIS tag or a GFP tag). Mutations can include, for example, substitutions, insertions, additions, deletions, and translocations, generated by any method known in the art. Methods for producing mutations may be found in in references such as Molecular Cloning: A Laboratory Manual, J. Sambrook, et al., eds., Fourth Edition, Cold Spring Harbor Laboratory Press, Cold Spring Harbor, New York, 2012, or Current Protocols in Molecular Biology, F. M. Ausubel, et al., eds., John Wiley & Sons, Inc., New York, 2010.

[0402] In some embodiments, methods for producing variants include circular permutation (Yu and Lutz, Trends Biotechnol. 2011 January;29(1):18-25). In circular permutation, the linear primary sequence of a polypeptide can be circularized (e.g., by joining the N-terminal and C-terminal ends of the sequence) and the polypeptide can be severed (“broken”) at a different location. Thus, the linear primary sequence of the new polypeptide may have low sequence identity (e.g., less than 80%, less than 75%, less than 70%, less than 65%, less than 60%, less than 55%, less than 50%, less than 45%, less than 40%, less than 35%, less than 30%, less than 25%, less than 20%, less than 15%, less than 10%, less or less than 5%, including all values in between) as determined by linear sequence alignment methods (e.g., Clustal Omega or BLAST). Topological analysis of the two proteins, however, may reveal that the tertiary structure of the two polypeptides is similar or dissimilar. Without being bound by a particular theory, a variant polypeptide created through circular permutation of a reference polypeptide and with a similar tertiary structure as the reference polypeptide can share similar functional characteristics (e.g., enzymatic activity, enzyme kinetics, substrate specificity or product specificity). In some instances, circular permutation may alter the secondary structure, tertiary structure or quaternary structure and produce an enzyme with different functional characteristics (e.g., increased or decreased enzymatic activity, different substrate specificity, or different product specificity). See, e.g., Yu and Lutz, Trends Biotechnol. 2011 January;29(1):18-25.

[0403] It should be appreciated that in a protein that has undergone circular permutation, the linear amino acid sequence of the protein would differ from a reference protein that has not undergone circular permutation. However, one of ordinary skill in the art would be able to determine which residues in the protein that has undergone circular permutation correspond to residues in the reference protein that has not undergone circular permutation by, for example, aligning the sequences and detecting conserved motifs, and/or by comparing the structures or predicted structures of the proteins, e.g., by homology modeling.

[0404] In some embodiments, an algorithm that determines the percent identity between a sequence of interest and a reference sequence described in this application accounts for the presence of circular permutation between the sequences. The presence of circular permutation may be detected using any method known in the art, including, for example, RASPODOM (Weiner et al., Bioinformatics. 2005 Apr. 1; 21(7):932-7). In some embodiments, the presence of circulation permutation is corrected for (e.g., the domains in at least one sequence are rearranged) prior to calculation of the percent identity between a sequence of interest and a sequence described in this application. The claims of this application should be understood to encompass sequences for which percent identity to a reference sequence is calculated after taking into account potential circular permutation of the sequence.

### Expression of Nucleic Acids in Host Cells

[0405] Aspects of the present disclosure relate to recombinant enzymes, functional modifications and variants thereof, as well as their uses. For example, the methods described in this application may be used to produce cannabinoids and/or cannabinoid precursors. The methods may comprise using a host cell comprising an enzyme disclosed in this application, cell lysate, isolated enzymes, or any combination thereof. Methods comprising recombinant expression of genes encoding an enzyme disclosed in this application in a host cell are encompassed by the present disclosure. In vitro methods comprising reacting one or more cannabinoid precursors or cannabinoids in a reaction mixture with an enzyme disclosed in this application are also encompassed by the present disclosure. In some embodiments, the enzyme is a PKC.

[0406] A nucleic acid encoding any of the recombinant polypeptides (e.g., AAE, PKS, PKC, PT, or TS enzyme) described in this application may be incorporated into any appropriate vector through any method known in the art. For example, the vector may be an expression vector, including but not limited to a viral vector (e.g., a lentiviral, retroviral, adenoviral, or adeno-associated viral vector), any vector suitable for transient expression, any vector suitable for constitutive expression, or any vector suitable for inducible expression (e.g., a galactose-inducible or doxycycline-inducible vector).

[0407] A vector encoding any of the recombinant polypeptides (e.g., AAE, PKS, PKC, PT, or TS enzyme) described in this application may be introduced into a suitable host cell using any method known in the art. Non-limiting examples of yeast transformation protocols are described in Gietz et al., Yeast transformation can be conducted by the LiAc/SS Carrier DNA/PEG method. Methods Mol Biol. 2006; 313:107-20, which is hereby incorporated by reference in its entirety. Host cells may be cultured under any conditions suitable as would be understood by one of ordinary skill in the art. For example, any media, temperature, and incubation conditions known in the art may be used. For host cells carrying an inducible vector, cells may be cultured with an appropriate inducible agent to promote expression.

[0408] In some embodiments, a vector replicates autonomously in the cell. In some embodiments, a vector integrates into a chromosome within a cell. A vector can contain one or more endonuclease restriction sites that are cut by a restriction endonuclease to insert and ligate a nucleic acid containing a gene described in this application to produce a recombinant vector that is able to replicate in a cell. Vectors are typically composed of DNA, although RNA vectors are also available. Cloning vectors include, but are not limited to: plasmids, fosmids, phagemids, virus genomes and artificial chromosomes. As used in this application, the terms “expression vector” or “expression construct” refer to a nucleic acid construct, generated recombinantly or synthetically, with a series of specified nucleic acid elements that permit transcription of a particular nucleic acid in a host cell (e.g., microbe), such as a yeast cell. In some embodiments, the nucleic acid sequence of a gene described in this application is inserted into a cloning vector so that it is operably joined to regulatory sequences and, in some embodiments, expressed as an RNA transcript. In some embodiments, the vector contains one or more markers, such as a selectable marker as described in this application, to identify cells transformed or transfected with the recombinant vector. In some embodiments, a host cell has already been transformed with one or more vectors. In some embodiments, a host cell that has been transformed with one or more vectors is subsequently transformed with one or more vectors. In some embodiments, a host cell is transformed simultaneously with more than one vector. In some embodiments, a cell that has been transformed with a vector or an expression cassette incorporates all or part of the vector or expression cassette into its genome. In some embodiments, the nucleic acid sequence of a gene described in this application is recoded. Recoding may increase production of the gene product by at least 10%, at least 15%, at least 20%, at least 25%, at least 30%, at least 35%, at least 40%, at least 45%, at least 50%, at least 55%, at least 60%, at least 65%, at least 70%, at least 75%, at least 80%, at least 85%, at least 90%, at least 95%, or 100%, including all values in between) relative to a reference sequence that is not recoded.

[0409] In some embodiments, the nucleic acid encoding any of the proteins described in this application is under the control of regulatory sequences (e.g., enhancer sequences). In some embodiments, a nucleic acid is expressed under the control of a promoter. The promoter can be a native promoter, e.g., the promoter of the gene in its endogenous context, which provides normal regulation of expression of the gene. Alternatively, a promoter can be a promoter that is different from the native promoter of the gene, e.g., the promoter is different from the promoter of the gene in its endogenous context.

[0410] In some embodiments, the promoter is a eukaryotic promoter. Non-limiting examples of eukaryotic promoters include TDH3, PGK1, PKC1, PDC1, TEF1, TEF2, RPL18B, SSA1, TDH2, PYK1, TP11, GAL1, GAL10, GAL7, GAL3, GAL2, MET3, MET25, HXT3, HXT7, ACT1, ADH1, ADH2, CUP1-1, ENO2, and SOD1, as would be known to one of ordinary skill in the art (see, e.g., Addgene website: blog.addgene.org/plasmids-101-the-promoter-region). In some embodiments, the promoter is a prokaryotic promoter (e.g., bacteriophage or bacterial promoter). Non-limiting examples of bacteriophage promoters include Pls1con, T3, T7, SP6, and PL. Non-limiting examples of bacterial promoters include Pbad, PmgrB, Ptrc2, Plac/ara, Ptac, and Pm.

[0411] In some embodiments, the promoter is an inducible promoter. As used in this application, an “inducible promoter” is a promoter controlled by the presence or absence of a molecule. This may be used, for example, to controllably induce the expression of an enzyme. In some embodiments, an inducible promoter linked to a PKC, a PT and/or a TS may be used to regulate expression of the enzyme(s), for example to reduce cannabinoid production in certain scenarios (e.g., during transport of the genetically modified organism to satisfy regulatory restrictions in certain jurisdictions, or between jurisdictions, where cannabinoids may not be shipped). In some embodiments, an inducible promoter linked to a CBGAS and/or a TS, the CBGAS and/or TS may be used to regulate expression of the enzyme(s), for example to reduce cannabinoid production in certain scenarios (e.g., during transport of the genetically modified organism to satisfy regulatory restrictions in certain jurisdictions, or between jurisdictions, where cannabinoids may not be shipped). Non-limiting examples of inducible promoters include chemically regulated promoters and physically regulated promoters. For chemically regulated promoters, the transcriptional activity can be regulated by one or more compounds, such as alcohol, tetracycline, galactose, a steroid, a metal, an amino acid, or other compounds. For physically regulated promoters, transcriptional activity can be regulated by a phenomenon such as light or temperature. Non-limiting examples of tetracycline-regulated promoters include anhydrotetracycline (aTc)-responsive promoters and other tetracycline-responsive promoter systems (e.g., a tetracycline repressor protein (tetR), a tetracycline operator sequence (tetO) and a tetracycline transactivator fusion protein (tTA)). Non-limiting examples of steroid-regulated promoters include promoters based on the rat glucocorticoid receptor, human estrogen receptor, moth ecdysone receptors, and promoters from the steroid/retinoid/thyroid receptor superfamily. Non-limiting examples of metal-regulated promoters include promoters derived from metallothionein (proteins that bind and sequester metal ions) genes. Non-limiting examples of pathogenesis-regulated promoters include promoters induced by salicylic acid, ethylene or benzothiadiazole (BTH). Non-limiting examples of temperature/heat-inducible promoters include heat shock promoters. Non-limiting examples of light-regulated promoters include light responsive promoters from plant cells. In certain embodiments, the inducible promoter is a galactose-inducible promoter. In some embodiments, the inducible promoter is induced by one or more physiological conditions (e.g., pH, temperature, radiation, osmotic pressure, saline gradients, cell surface binding, or concentration of one or more extrinsic or intrinsic inducing agents). Non-limiting examples of an extrinsic inducer or inducing agent include amino acids and amino acid analogs, saccharides and polysaccharides, nucleic acids, protein transcriptional activators and repressors, cytokines, toxins, petroleum-based compounds, metal containing compounds, salts, ions, enzyme substrate analogs, hormones or any combination.

[0412] In some embodiments, the promoter is a constitutive promoter. As used in this application, a “constitutive promoter” refers to an unregulated promoter that allows continuous transcription of a gene. Non-limiting examples of a constitutive promoter include TDH3, PGK1, PKC1, PDC1, TEF1, TEF2, RPL18B, SSA1, TDH2, PYK1, TP11, HXT3, HXT7, ACT1, ADH1, ADH2, ENO2, and SOD1.

[0413] Other inducible promoters or constitutive promoters, including synthetic promoters, that may be known to one of ordinary skill in the art are also contemplated.

[0414] The precise nature of the regulatory sequences needed for gene expression may vary between species or cell types, but generally include, as necessary, 5′ non-transcribed and 5′ non-translated sequences involved with the initiation of transcription and translation respectively, such as a TATA box, capping sequence, CAAT sequence, and the like. In particular, such 5′ non-transcribed regulatory sequences will include a promoter region which includes a promoter sequence for transcriptional control of the operably joined gene. Regulatory sequences may also include enhancer sequences or upstream activator sequences. The vectors disclosed may include 5′ leader or signal sequences. The regulatory sequence may also include a terminator sequence. In some embodiments, a terminator sequence marks the end of a gene in DNA during transcription. The choice and design of one or more appropriate vectors suitable for inducing expression of one or more genes described in this application in a heterologous organism is within the ability and discretion of one of ordinary skill in the art.

[0415] Expression vectors containing the necessary elements for expression are commercially available and known to one of ordinary skill in the art (see, e.g., Sambrook et al., Molecular Cloning: A Laboratory Manual, Fourth Edition, Cold Spring Harbor Laboratory Press, 2012).

### Host Cells

[0416] The disclosed cannabinoid biosynthetic methods and host cells are exemplified with S. cerevisiae, but are also applicable to other host cells, as would be understood by one of ordinary skill in the art.

[0417] Suitable host cells include, but are not limited to: yeast cells, bacterial cells, algal cells, plant cells, fungal cells, insect cells, and animal cells, including mammalian cells. In one illustrative embodiment, suitable host cells include E. coli (e.g., Shuffle™ competent E. coli available from New England BioLabs in Ipswich, Mass.).

[0418] Other suitable host cells of the present disclosure include microorganisms of the genus Corynebacterium. In some embodiments, preferred Corynebacterium strains/species include: C. efficiens, with the deposited type strain being DSM44549, C. glutamicum, with the deposited type strain being ATCC13032, and C. ammoniagenes, with the deposited type strain being ATCC6871. In some embodiments the preferred host cell of the present disclosure is C. glutamicum.

[0419] Suitable host cells of the genus Corynebacterium, in particular of the species Corynebacterium glutamicum, are in particular the known wild-type strains: Corynebacterium glutamicum ATCC13032, Corynebacterium acetoglutamicum ATCC15806, Corynebacterium acetoacidophilum ATCC13870, Corynebacterium melassecola ATCC17965, Corynebacterium thermoaminogenes FERM BP-1539, Brevibacterium flavum ATCC14067, Brevibacterium lactofermentum ATCC13869, and Brevibacterium divaricatum ATCC14020; and L-amino acid-producing mutants, or strains, prepared therefrom, such as, for example, the L-lysine-producing strains: Corynebacterium glutamicum FERM-P 1709, Brevibacterium flavum FERM-P 1708, Brevibacterium lactofermentum FERM-P 1712, Corynebacterium glutamicum FERM-P 6463, Corynebacterium glutamicum FERM-P 6464, Corynebacterium glutamicum DM58-1, Corynebacterium glutamicum DG52-5, Corynebacterium glutamicum DSM5714, and Corynebacterium glutamicum DSM12866.

[0420] Suitable yeast host cells include, but are not limited to: Candida, Hansenula, Saccharomyces, Schizosaccharomyces, Pichia, Kluyveromyces, and Yarrowia. In some embodiments, the yeast cell is Hansenula polymorpha, Saccharomyces cerevisiae, Saccaromyces carlsbergensis, Saccharomyces diastaticus, Saccharomyces norbensis, Saccharomyces kluyveri, Schizosaccharomyces pombe, Pichia finlandica, Pichia trehalophila, Pichia kodamae, Pichia membranaefaciens, Pichia opuntiae, Pichia pastoris, Pichia pseudopastoris, Pichia membranifaciens, Komagataella pseudopastoris, Komagataella pastoris, Komagataella kurtzmanii, Komagataella mondaviorum, Pichia thermotolerans, Pichia salictaria, Pichia quercuum, Pichia pijperi, Pichia stipitis, Pichia methanolica, Pichia angusta, Komagataella phaffii, Komagataella pastoris, Kluyveromyces lactis, Candida albicans, Candida boidinii or Yarrowia lipolytica.

[0421] In some embodiments, the yeast strain is an industrial polyploid yeast strain. Other non-limiting examples of fungal cells include cells obtained from Aspergillus spp., Penicillium spp., Fusarium spp., Rhizopus spp., Acremonium spp., Neurospora spp., Sordaria spp., Magnaporthe spp., Allomyces spp., Ustilago spp., Botrytis spp., and Trichoderma spp.

[0422] In certain embodiments, the host cell is an algal cell such as, Chlamydomonas (e.g., C. Reinhardtii) and Phormidium (P. sp. ATCC29409).

[0423] In other embodiments, the host cell is a prokaryotic cell. Suitable prokaryotic cells include gram positive, gram negative, and gram-variable bacterial cells. The host cell may be a species of, but not limited to: Agrobacterium, Alicyclobacillus, Anabaena, Anacystis, Acinetobacter, Acidothermus, Arthrobacter, Azobacter, Bacillus, Bifidobacterium, Brevibacterium, Butyrivibrio, Buchnera, Campestris, Camplyobacter, Clostridium, Corynebacterium, Chromatium, Coprococcus, Escherichia, Enterococcus, Enterobacter, Erwinia, Fusobacterium, Faecalibacterium, Francisella, Flavobacterium, Geobacillus, Haemophilus, Helicobacter, Klebsiella, Lactobacillus, Lactococcus, Ilyobacter, Micrococcus, Microbacterium, Mesorhizobium, Methylobacterium, Methylobacterium, Mycobacterium, Neisseria, Pantoea, Pseudomonas, Prochlorococcus, Rhodobacter, Rhodopseudomonas, Rhodopseudomonas, Roseburia, Rhodospirillum, Rhodococcus, Scenedesmus, Streptomyces, Streptococcus, Synecoccus, Saccharomonospora, Saccharopolyspora, Staphylococcus, Serratia, Salmonella, Shigella, Thermoanaerobacterium, Tropheryma, Tularensis, Temecula, Thermosynechococcus, Thermococcus, Ureaplasma, Xanthomonas, Xylella, Yersinia, and Zymomonas.

[0424] In some embodiments, the bacterial host strain is an industrial strain. Numerous bacterial industrial strains are known and suitable for the methods and compositions described in this application.

[0425] In some embodiments, the bacterial host cell is of the Agrobacterium species (e.g., A. radiobacter, A. rhizogenes, A. rubi), the Arthrobacter species (e.g., A. aurescens, A. citreus, A. globformis, A. hydrocarboglutamicus, A. mysorens, A. nicotianae, A. paraffineus, A. protophonniae, A. roseoparaffinus, A. sulfureus, A. ureafaciens), the Bacillus species (e.g., B. thuringiensis, B. anthracis, B. megaterium, B. subtilis, B. lentus, B. circulars, B. pumilus, B. lautus, B. coagulans, B. brevis, B. firmus, B. alkaophius, B. licheniformis, B. clausii, B. stearothermophilus, B. halodurans and B. amyloliquefaciens. In particular embodiments, the host cell will be an industrial Bacillus strain including but not limited to B. subtilis, B. pumilus, B. licheniformis, B. megaterium, B. clausii, B. stearothermophilus and B. amyloliquefaciens. In some embodiments, the host cell will be an industrial Clostridium species (e.g., C. acetobutylicum, C. tetani E88, C. lituseburense, C. saccharobutylicum, C. perfringens, C. beijerinckii). In some embodiments, the host cell will be an industrial Corynebacterium species (e.g., C. glutamicum, C. acetoacidophilum). In some embodiments, the host cell will be an industrial Escherichia species (e.g., E. coli). In some embodiments, the host cell will be an industrial Erwinia species (e.g., E. uredovora, E. carotovora, E. ananas, E. herbicola, E. punctata, E. terreus). In some embodiments, the host cell will be an industrial Pantoea species (e.g., P. citrea, P. agglomerans). In some embodiments, the host cell will be an industrial Pseudomonas species, (e.g., P. putida, P. aeruginosa, P. mevalonii). In some embodiments, the host cell will be an industrial Streptococcus species (e.g., S. equisimiles, S. pyogenes, S. uberis). In some embodiments, the host cell will be an industrial Streptomyces species (e.g., S. ambofaciens, S. achromogenes, S. avermitilis, S. coelicolor, S. aureofaciens, S. aureus, S. fungicidicus, S. griseus, S. lividans). In some embodiments, the host cell will be an industrial Zymomonas species (e.g., Z. mobilis, Z. lipolytica), and the like.

[0426] The present disclosure is also suitable for use with a variety of animal cell types, including mammalian cells, for example, human (including 293, HeLa, WI38, PER.C6 and Bowes melanoma cells), mouse (including 3T3, NS0, NS1, Sp2/0), hamster (CHO, BHK), monkey (COS, FRhL, Vero), insect cells, for example fall armyworm (including Sf9 and Sf21), silkmoth (including BmN), cabbage looper (including BTI-Tn-5B1-4) and common fruit fly (including Schneider 2), and hybridoma cell lines.

[0427] In various embodiments, strains that may be used in the practice of the disclosure including both prokaryotic and eukaryotic strains, and are readily accessible to the public from a number of culture collections such as American Type Culture Collection (ATCC), Deutsche Sammlung von Mikroorganismen and Zellkulturen GmbH (DSM), Centraalbureau Voor Schimmelcultures (CBS), and Agricultural Research Service Patent Culture Collection, Northern Regional Research Center (NRRL). The present disclosure is also suitable for use with a variety of plant cell types. In some embodiments, the plant is of the Cannabis genus in the family Cannabaceae. In certain embodiments, the plant is of the species Cannabis sativa, Cannabis indica, or Cannabis ruderalis. In other embodiments, the plant is of the genus Nicotiana in the family Solanaceae. In certain embodiments, the plant is of the species Nicotiana rustica.

[0428] The term “cell,” as used in this application, may refer to a single cell or a population of cells, such as a population of cells belonging to the same cell line or strain. Use of the singular term “cell” should not be construed to refer explicitly to a single cell rather than a population of cells. The host cell may comprise genetic modifications relative to a wild-type counterpart. Reduction of gene expression and/or gene inactivation in a host cell may be achieved through any suitable method, including but not limited to, deletion of the gene, introduction of a point mutation into the gene, selective editing of the gene and/or truncation of the gene. For example, polymerase chain reaction (PCR)-based methods may be used (see, e.g., Gardner et al., Methods Mol Biol. 2014; 1205:45-78). As a non-limiting example, genes may be deleted through gene replacement (e.g., with a marker, including a selection marker). A gene may also be truncated through the use of a transposon system (see, e.g., Poussu et al., Nucleic Acids Res. 2005; 33(12): e104). A gene may also be edited through of the use of gene editing technologies known in the art, such as CRISPR-based technologies.

### Culturing of Host Cells

[0429] Any of the cells disclosed in this application can be cultured in media of any type (rich or minimal) and any composition prior to, during, and/or after contact and/or integration of a nucleic acid. The conditions of the culture or culturing process can be optimized through routine experimentation as would be understood by one of ordinary skill in the art. In some embodiments, the selected media is supplemented with various components. In some embodiments, the concentration and amount of a supplemental component is optimized. In some embodiments, other aspects of the media and growth conditions (e.g., pH, temperature, etc.) are optimized through routine experimentation. In some embodiments, the frequency that the media is supplemented with one or more supplemental components, and the amount of time that the cell is cultured, is optimized.

[0430] Culturing of the cells described in this application can be performed in culture vessels known and used in the art. In some embodiments, an aerated reaction vessel (e.g., a stirred tank reactor) is used to culture the cells. In some embodiments, a bioreactor or fermentor is used to culture the cell. Thus, in some embodiments, the cells are used in fermentation. As used in this application, the terms “bioreactor” and “fermentor” are interchangeably used and refer to an enclosure, or partial enclosure, in which a biological, biochemical and/or chemical reaction takes place that involves a living organism or part of a living organism. A “large-scale bioreactor” or “industrial-scale bioreactor” is a bioreactor that is used to generate a product on a commercial or quasi-commercial scale. Large scale bioreactors typically have volumes in the range of liters, hundreds of liters, thousands of liters, or more.

[0431] Non-limiting examples of bioreactors include: stirred tank fermentors, bioreactors agitated by rotating mixing devices, chemostats, bioreactors agitated by shaking devices, airlift fermentors, packed-bed reactors, fixed-bed reactors, fluidized bed bioreactors, bioreactors employing wave induced agitation, centrifugal bioreactors, roller bottles, and hollow fiber bioreactors, roller apparatuses (for example benchtop, cart-mounted, and/or automated varieties), vertically-stacked plates, spinner flasks, stirring or rocking flasks, shaken multi-well plates, MD bottles, T-flasks, Roux bottles, multiple-surface tissue culture propagators, modified fermentors, and coated beads (e.g., beads coated with serum proteins, nitrocellulose, or carboxymethyl cellulose to prevent cell attachment).

[0432] In some embodiments, the bioreactor includes a cell culture system where the cell (e.g., yeast cell) is in contact with moving liquids and/or gas bubbles. In some embodiments, the cell or cell culture is grown in suspension. In other embodiments, the cell or cell culture is attached to a solid phase carrier. Non-limiting examples of a carrier system includes microcarriers (e.g., polymer spheres, microbeads, and microdisks that can be porous or non-porous), cross-linked beads (e.g., dextran) charged with specific chemical groups (e.g., tertiary amine groups), 2D microcarriers including cells trapped in nonporous polymer fibers, 3D carriers (e.g., carrier fibers, hollow fibers, multicartridge reactors, and semi-permeable membranes that can comprising porous fibers), microcarriers having reduced ion exchange capacity, encapsulation cells, capillaries, and aggregates. In some embodiments, carriers are fabricated from materials such as dextran, gelatin, glass, or cellulose.

[0433] In some embodiments, industrial-scale processes are operated in continuous, semi-continuous or non-continuous modes. Non-limiting examples of operation modes are batch, fed batch, extended batch, repetitive batch, draw/fill, rotating-wall, spinning flask, and/or perfusion mode of operation. In some embodiments, a bioreactor allows continuous or semi-continuous replenishment of the substrate stock, for example a carbohydrate source and/or continuous or semi-continuous separation of the product, from the bioreactor.

[0434] In some embodiments, the bioreactor or fermentor includes a sensor and/or a control system to measure and/or adjust reaction parameters. Non-limiting examples of reaction parameters include biological parameters (e.g., growth rate, cell size, cell number, cell density, cell type, or cell state, etc.), chemical parameters (e.g., pH, redox-potential, concentration of reaction substrate and/or product, concentration of dissolved gases, such as oxygen concentration and CO₂ concentration, nutrient concentrations, metabolite concentrations, concentration of an oligopeptide, concentration of an amino acid, concentration of a vitamin, concentration of a hormone, concentration of an additive, serum concentration, ionic strength, concentration of an ion, relative humidity, molarity, osmolarity, concentration of other chemicals, for example buffering agents, adjuvants, or reaction by-products), physical/mechanical parameters (e.g., density, conductivity, degree of agitation, pressure, and flow rate, shear stress, shear rate, viscosity, color, turbidity, light absorption, mixing rate, conversion rate, as well as thermodynamic parameters, such as temperature, light intensity/quality, etc.). Sensors to measure the parameters described in this application are well known to one of ordinary skill in the relevant mechanical and electronic arts. Control systems to adjust the parameters in a bioreactor based on the inputs from a sensor described in this application are well known to one of ordinary skill in the art in bioreactor engineering.

[0435] In some embodiments, the method involves batch fermentation (e.g., shake flask fermentation). General considerations for batch fermentation (e.g., shake flask fermentation) include the level of oxygen and glucose. For example, batch fermentation (e.g., shake flask fermentation) may be oxygen and glucose limited, so in some embodiments, the capability of a strain to perform in a well-designed fed-batch fermentation is underestimated. Also, the final product (e.g., cannabinoid or cannabinoid precursor) may display some differences from the substrate in terms of solubility, toxicity, cellular accumulation and secretion and in some embodiments can have different fermentation kinetics.

[0436] In some embodiments, the cells of the present disclosure are adapted to produce cannabinoids or cannabinoid precursors in vivo. In some embodiments, the cells are adapted to secrete one or more enzymes for cannabinoid synthesis (e.g., AAE, PKS, PKC, PT, or TS). In some embodiments, the cells of the present disclosure are lysed, and the lysate is recovered for subsequent use. In such embodiments, the secreted or lysed enzyme can catalyze reactions for the production of a cannabinoid or precursor by bioconversion in an in vitro or ex vivo process. In some embodiments, any and all conversions described in this application can be conducted chemically or enzymatically, in vitro or in vivo.

### Purification and Further Processing

[0437] In some embodiments, any of the methods described in this application may include isolation and/or purification of the cannabinoids and/or cannabinoid precursors produced (e.g., produced in a bioreactor). For example, the isolation and/or purification can involve one or more of cell lysis, centrifugation, extraction, column chromatography, distillation, crystallization, and lyophilization.

[0438] The methods described in this application encompass production of any cannabinoid or cannabinoid precursor known in the art. Cannabinoids or cannabinoid precursors produced by any of the recombinant cells disclosed in this application or any of the in vitro methods described in this application may be identified and extracted using any method known in the art. Mass spectrometry (e.g., LC-MS, GC-MS) is a non-limiting example of a method for identification and may be used to extract a compound of interest.

[0439] In some embodiments, any of the methods described in this application further comprise decarboxylation of a cannabinoid or cannabinoid precursor. As a non-limiting example, the acid form of a cannabinoid or cannabinoid precursor may be heated (e.g., at least 90° C.) to decarboxylate the cannabinoid or cannabinoid precursor. See, e.g., U.S. Pat. Nos. 10,159,908, 10,143,706, 9,908,832 and 7,344,736. See also, e.g., Wang et al., Cannabis Cannabinoid Res. 2016; 1(1): 262-271.

### Compositions, Kits, and Administration

[0440] The present disclosure provides compositions, including pharmaceutical compositions, comprising a cannabinoid or a cannabinoid precursor, or pharmaceutically acceptable salt thereof, produced by any of the methods described in this application, and optionally a pharmaceutically acceptable excipient.

[0441] In certain embodiments, a cannabinoid or cannabinoid precursor described in this application is provided in an effective amount in a composition, such as a pharmaceutical composition. In certain embodiments, the effective amount is a therapeutically effective amount. In certain embodiments, the effective amount is a prophylactically effective amount.

[0442] Compositions, such as pharmaceutical compositions, described in this application can be prepared by any method known in the art. In general, such preparatory methods include bringing a compound described in this application (i.e., the “active ingredient”) into association with a carrier or excipient, and/or one or more other accessory ingredients, and then, if necessary and/or desirable, shaping, and/or packaging the product into a desired single- or multi-dose unit.

[0443] Pharmaceutical compositions can be prepared, packaged, and/or sold in bulk, as a single unit dose, and/or as a plurality of single unit doses. A “unit dose” is a discrete amount of the pharmaceutical composition comprising a predetermined amount of the active ingredient. The amount of the active ingredient is generally equal to the dosage of the active ingredient which would be administered to a subject and/or a convenient fraction of such a dosage, such as one-half or one-third of such a dosage.

[0444] Relative amounts of the active ingredient, the pharmaceutically acceptable excipient, and/or any additional ingredients in a pharmaceutical composition described in this application will vary, depending upon the identity, size, and/or condition of the subject treated and further depending upon the route by which the composition is to be administered. The composition may comprise between 0.1% and 100% (w/w) active ingredient.

[0445] Pharmaceutically acceptable excipients used in the manufacture of pharmaceutical compositions include inert diluents, dispersing and/or granulating agents, surface active agents and/or emulsifiers, disintegrating agents, binding agents, preservatives, buffering agents, lubricating agents, and/or oils. Excipients such as cocoa butter and suppository waxes, coloring agents, coating agents, sweetening, flavoring, and perfuming agents may also be present in the composition. Exemplary excipients include diluents, dispersing and/or granulating agents, surface active agents and/or emulsifiers, disintegrating agents, binding agents, preservatives, buffering agents, lubricating agents, and/or oils (e.g., synthetic oils, semi-synthetic oils) as disclosed in this application.

[0446] Exemplary diluents include calcium carbonate, sodium carbonate, calcium phosphate, dicalcium phosphate, calcium sulfate, calcium hydrogen phosphate, sodium phosphate lactose, sucrose, cellulose, microcrystalline cellulose, kaolin, mannitol, sorbitol, inositol, sodium chloride, dry starch, cornstarch, powdered sugar, and mixtures thereof.

[0447] Exemplary granulating and/or dispersing agents include potato starch, corn starch, tapioca starch, sodium starch glycolate, clays, alginic acid, guar gum, citrus pulp, agar, bentonite, cellulose, and wood products, natural sponge, cation-exchange resins, calcium carbonate, silicates, sodium carbonate, cross-linked poly(vinyl-pyrrolidone) (crospovidone), sodium carboxymethyl starch (sodium starch glycolate), carboxymethyl cellulose, cross-linked sodium carboxymethyl cellulose (croscarmellose), methylcellulose, pregelatinized starch (starch 1500), microcrystalline starch, water insoluble starch, calcium carboxymethyl cellulose, magnesium aluminum silicate (Veegum), sodium lauryl sulfate, quaternary ammonium compounds, and mixtures thereof.

[0448] Exemplary surface active agents and/or emulsifiers include natural emulsifiers (e.g., acacia, agar, alginic acid, sodium alginate, tragacanth, chondrux, cholesterol, xanthan, pectin, gelatin, egg yolk, casein, wool fat, cholesterol, wax, and lecithin), colloidal clays (e.g., bentonite (aluminum silicate) and Veegum (magnesium aluminum silicate)), long chain amino acid derivatives, high molecular weight alcohols (e.g., stearyl alcohol, cetyl alcohol, oleyl alcohol, triacetin monostearate, ethylene glycol distearate, glyceryl monostearate, and propylene glycol monostearate, polyvinyl alcohol), carbomers (e.g., carboxy polymethylene, polyacrylic acid, acrylic acid polymer, and carboxyvinyl polymer), carrageenan, cellulosic derivatives (e.g., carboxymethylcellulose sodium, powdered cellulose, hydroxymethyl cellulose, hydroxypropyl cellulose, hydroxypropyl methylcellulose, methylcellulose), sorbitan fatty acid esters (e.g., polyoxyethylene sorbitan monolaurate (Tween® 20), polyoxyethylene sorbitan (Tween® 60), polyoxyethylene sorbitan monooleate (Tween® 80), sorbitan monopalmitate (Span® 40), sorbitan monostearate (Span® 60), sorbitan tristearate (Span® 65), glyceryl monooleate, sorbitan monooleate (Span® 80), polyoxyethylene esters (e.g., polyoxyethylene monostearate (Myrj® 45), polyoxyethylene hydrogenated castor oil, polyethoxylated castor oil, polyoxymethylene stearate, and Solutol®), sucrose fatty acid esters, polyethylene glycol fatty acid esters (e.g., Cremophor®), polyoxyethylene ethers, (e.g., polyoxyethylene lauryl ether (Brij® 30)), poly(vinyl-pyrrolidone), diethylene glycol monolaurate, triethanolamine oleate, sodium oleate, potassium oleate, ethyl oleate, oleic acid, ethyl laurate, sodium lauryl sulfate, Pluronic® F-68, poloxamer P-188, cetrimonium bromide, cetylpyridinium chloride, benzalkonium chloride, docusate sodium, and/or mixtures thereof.

[0449] Exemplary binding agents include starch (e.g., cornstarch and starch paste), gelatin, sugars (e.g., sucrose, glucose, dextrose, dextrin, molasses, lactose, lactitol, mannitol, etc.), natural and synthetic gums (e.g., acacia, sodium alginate, extract of Irish moss, panwar gum, ghatti gum, mucilage of isapol husks, carboxymethylcellulose, methylcellulose, ethylcellulose, hydroxyethylcellulose, hydroxypropyl cellulose, hydroxypropyl methylcellulose, microcrystalline cellulose, cellulose acetate, poly(vinyl-pyrrolidone), magnesium aluminum silicate (Veegum©), and larch arabogalactan), alginates, polyethylene oxide, polyethylene glycol, inorganic calcium salts, silicic acid, polymethacrylates, waxes, water, alcohol, and/or mixtures thereof.

[0450] Exemplary preservatives include antioxidants, chelating agents, antimicrobial preservatives, antifungal preservatives, antiprotozoan preservatives, alcohol preservatives, acidic preservatives, and other preservatives. In certain embodiments, the preservative is an antioxidant. In other embodiments, the preservative is a chelating agent.

[0451] Exemplary antioxidants include alpha tocopherol, ascorbic acid, acorbyl palmitate, butylated hydroxyanisole, butylated hydroxytoluene, monothioglycerol, potassium metabisulfite, propionic acid, propyl gallate, sodium ascorbate, sodium bisulfite, sodium metabisulfite, and sodium sulfite.

[0452] Exemplary chelating agents include ethylenediaminetetraacetic acid (EDTA) and salts and hydrates thereof (e.g., sodium edetate, disodium edetate, trisodium edetate, calcium disodium edetate, dipotassium edetate, and the like), citric acid and salts and hydrates thereof (e.g., citric acid monohydrate), fumaric acid and salts and hydrates thereof, malic acid and salts and hydrates thereof, phosphoric acid and salts and hydrates thereof, and tartaric acid and salts and hydrates thereof. Exemplary antimicrobial preservatives include benzalkonium chloride, benzethonium chloride, benzyl alcohol, bronopol, cetrimide, cetylpyridinium chloride, chlorhexidine, chlorobutanol, chlorocresol, chloroxylenol, cresol, ethyl alcohol, glycerin, hexetidine, imidurea, phenol, phenoxyethanol, phenylethyl alcohol, phenylmercuric nitrate, propylene glycol, and thimerosal.

[0453] Exemplary antifungal preservatives include butyl paraben, methyl paraben, ethyl paraben, propyl paraben, benzoic acid, hydroxybenzoic acid, potassium benzoate, potassium sorbate, sodium benzoate, sodium propionate, and sorbic acid.

[0454] Exemplary alcohol preservatives include ethanol, polyethylene glycol, phenol, phenolic compounds, bisphenol, chlorobutanol, hydroxybenzoate, and phenylethyl alcohol.

[0455] Exemplary acidic preservatives include vitamin A, vitamin C, vitamin E, beta-carotene, citric acid, acetic acid, dehydroacetic acid, ascorbic acid, sorbic acid, and phytic acid.

[0456] Other preservatives include tocopherol, tocopherol acetate, deteroxime mesylate, cetrimide, butylated hydroxyanisol (BHA), butylated hydroxytoluened (BHT), ethylenediamine, sodium lauryl sulfate (SLS), sodium lauryl ether sulfate (SLES), sodium bisulfite, sodium metabisulfite, potassium sulfite, potassium metabisulfite, Glydant® Plus, Phenonip®, methylparaben, Germall® 115, Germaben® II, Neolone®, Kathon®, and Euxyl®.

[0457] Exemplary buffering agents include citrate buffer solutions, acetate buffer solutions, phosphate buffer solutions, ammonium chloride, calcium carbonate, calcium chloride, calcium citrate, calcium glubionate, calcium gluceptate, calcium gluconate, D-gluconic acid, calcium glycerophosphate, calcium lactate, propanoic acid, calcium levulinate, pentanoic acid, dibasic calcium phosphate, phosphoric acid, tribasic calcium phosphate, calcium hydroxide phosphate, potassium acetate, potassium chloride, potassium gluconate, potassium mixtures, dibasic potassium phosphate, monobasic potassium phosphate, potassium phosphate mixtures, sodium acetate, sodium bicarbonate, sodium chloride, sodium citrate, sodium lactate, dibasic sodium phosphate, monobasic sodium phosphate, sodium phosphate mixtures, tromethamine, magnesium hydroxide, aluminum hydroxide, alginic acid, pyrogen-free water, isotonic saline, Ringer's solution, ethyl alcohol, and mixtures thereof.

[0458] Exemplary lubricating agents include magnesium stearate, calcium stearate, stearic acid, silica, talc, malt, glyceryl behanate, hydrogenated vegetable oils, polyethylene glycol, sodium benzoate, sodium acetate, sodium chloride, leucine, magnesium lauryl sulfate, sodium lauryl sulfate, and mixtures thereof.

[0459] Exemplary natural oils include almond, apricot kernel, avocado, babassu, bergamot, black current seed, borage, cade, camomile, canola, caraway, carnauba, castor, cinnamon, cocoa butter, coconut, cod liver, coffee, corn, cotton seed, emu, eucalyptus, evening primrose, fish, flaxseed, geraniol, gourd, grape seed, hazel nut, hyssop, isopropyl myristate, jojoba, kukui nut, lavandin, lavender, lemon, litsea cubeba, macademia nut, mallow, mango seed, meadowfoam seed, mink, nutmeg, olive, orange, orange roughy, palm, palm kernel, peach kernel, peanut, poppy seed, pumpkin seed, rapeseed, rice bran, rosemary, safflower, sandalwood, sasquana, savoury, sea buckthorn, sesame, shea butter, silicone, soybean, sunflower, tea tree, thistle, tsubaki, vetiver, walnut, and wheat germ oils. Exemplary synthetic or semi-synthetic oils include, but are not limited to, butyl stearate, medium chain triglycerides (such as caprylic triglyceride and capric triglyceride), cyclomethicone, diethyl sebacate, dimethicone 360, isopropyl myristate, mineral oil, octyldodecanol, oleyl alcohol, silicone oil, and mixtures thereof. In certain embodiments, exemplary synthetic oils comprise medium chain triglycerides (such as caprylic triglyceride and capric triglyceride).

[0460] Liquid dosage forms for oral and parenteral administration include pharmaceutically acceptable emulsions, microemulsions, solutions, suspensions, syrups and elixirs. In addition to the active ingredients, the liquid dosage forms may comprise inert diluents commonly used in the art such as, for example, water or other solvents, solubilizing agents and emulsifiers such as ethyl alcohol, isopropyl alcohol, ethyl carbonate, ethyl acetate, benzyl alcohol, benzyl benzoate, propylene glycol, 1,3-butylene glycol, dimethylformamide, oils (e.g., cottonseed, groundnut, corn, germ, olive, castor, and sesame oils), glycerol, tetrahydrofurfuryl alcohol, polyethylene glycols and fatty acid esters of sorbitan, and mixtures thereof. Besides inert diluents, the oral compositions can include adjuvants such as wetting agents, emulsifying and suspending agents, sweetening, flavoring, and perfuming agents. In certain embodiments for parenteral administration, the conjugates described in this application are mixed with solubilizing agents such as Cremophor®, alcohols, oils, modified oils, glycols, polysorbates, cyclodextrins, polymers, and mixtures thereof.

[0461] Injectable preparations, for example, sterile injectable aqueous or oleaginous suspensions can be formulated according to the known art using suitable dispersing or wetting agents and suspending agents. The sterile injectable preparation can be a sterile injectable solution, suspension, or emulsion in a nontoxic parenterally acceptable diluent or solvent, for example, as a solution in 1,3-butanediol. Among the acceptable vehicles and solvents that can be employed are water, Ringer's solution, U.S.P., and isotonic sodium chloride solution. In addition, sterile, fixed oils are conventionally employed as a solvent or suspending medium. For this purpose, any bland fixed oil can be employed including synthetic mono- or di-glycerides. In addition, fatty acids such as oleic acid are used in the preparation of injectables.

[0462] The injectable formulations can be sterilized, for example, by filtration through a bacterial-retaining filter, or by incorporating sterilizing agents in the form of sterile solid compositions which can be dissolved or dispersed in sterile water or other sterile injectable medium prior to use.

[0463] In order to prolong the effect of a drug, it is often desirable to slow the absorption of the drug from subcutaneous or intramuscular injection. This can be accomplished by the use of a liquid suspension of crystalline or amorphous material with poor water solubility. The rate of absorption of the drug then depends upon its rate of dissolution, which, in turn, may depend upon crystal size and crystalline form. Alternatively, delayed absorption of a parenterally administered drug form may be accomplished by dissolving or suspending the drug in an oil vehicle.

[0464] Compositions for rectal or vaginal administration are typically suppositories which can be prepared by mixing the conjugates described in this application with suitable non-irritating excipients or carriers such as cocoa butter, polyethylene glycol, or a suppository wax which are solid at ambient temperature but liquid at body temperature and therefore melt in the rectum or vaginal cavity and release the active ingredient.

[0465] Solid dosage forms for oral administration include capsules, tablets, pills, powders, and granules. In such solid dosage forms, the active ingredient is mixed with at least one inert, pharmaceutically acceptable excipient or carrier such as sodium citrate or dicalcium phosphate and/or (a) fillers or extenders such as starches, lactose, sucrose, glucose, mannitol, and silicic acid, (b) binders such as, for example, carboxymethylcellulose, alginates, gelatin, polyvinylpyrrolidinone, sucrose, and acacia, (c) humectants such as glycerol, (d) disintegrating agents such as agar, calcium carbonate, potato or tapioca starch, alginic acid, certain silicates, and sodium carbonate, (e) solution retarding agents such as paraffin, (f) absorption accelerators such as quaternary ammonium compounds, (g) wetting agents such as, for example, cetyl alcohol and glycerol monostearate, (h) absorbents such as kaolin and bentonite clay, and (i) lubricants such as talc, calcium stearate, magnesium stearate, solid polyethylene glycols, sodium lauryl sulfate, and mixtures thereof. In the case of capsules, tablets, and pills, the dosage form may include a buffering agent.

[0466] Solid compositions of a similar type can be employed as fillers in soft and hard-filled gelatin capsules using such excipients as lactose or milk sugar as well as high molecular weight polyethylene glycols and the like. The solid dosage forms of tablets, dragees, capsules, pills, and granules can be prepared with coatings and shells such as enteric coatings and other coatings well known in the art of pharmacology. They may optionally comprise opacifying agents and can be of a composition that they release the active ingredient(s) only, or preferentially, in a certain part of the intestinal tract, optionally, in a delayed manner. Examples of encapsulating compositions which can be used include polymeric substances and waxes. Solid compositions of a similar type can be employed as fillers in soft and hard-filled gelatin capsules using such excipients as lactose or milk sugar as well as high molecular weight polethylene glycols and the like.

[0467] The active ingredient can be in a micro-encapsulated form with one or more excipients as noted above. The solid dosage forms of tablets, dragees, capsules, pills, and granules can be prepared with coatings and shells such as enteric coatings, release controlling coatings, and other coatings well known in the pharmaceutical formulating art. In such solid dosage forms the active ingredient can be admixed with at least one inert diluent such as sucrose, lactose, or starch. Such dosage forms may comprise, as is normal practice, additional substances other than inert diluents, e.g., tableting lubricants and other tableting aids such a magnesium stearate and microcrystalline cellulose. In the case of capsules, tablets and pills, the dosage forms may comprise buffering agents. They may optionally comprise opacifying agents and can be of a composition that they release the active ingredient(s) only, or preferentially, in a certain part of the intestinal tract, optionally, in a delayed manner. Examples of encapsulating agents which can be used include polymeric substances and waxes.

[0468] Dosage forms for topical and/or transdermal administration of a compound described in this application may include ointments, pastes, creams, lotions, gels, powders, solutions, sprays, inhalants, and/or patches. Generally, the active ingredient is admixed under sterile conditions with a pharmaceutically acceptable carrier or excipient and/or any needed preservatives and/or buffers as can be required. Additionally, the present disclosure contemplates the use of transdermal patches, which often have the added advantage of providing controlled delivery of an active ingredient to the body. Such dosage forms can be prepared, for example, by dissolving and/or dispensing the active ingredient in the proper medium. Alternatively or additionally, the rate can be controlled by either providing a rate controlling membrane and/or by dispersing the active ingredient in a polymer matrix and/or gel.

[0469] Suitable devices for use in delivering intradermal pharmaceutical compositions described in this application include short needle devices. Intradermal compositions can be administered by devices which limit the effective penetration length of a needle into the skin. Alternatively or additionally, conventional syringes can be used in the classical mantoux method of intradermal administration. Jet injection devices which deliver liquid formulations to the dermis via a liquid jet injector and/or via a needle which pierces the stratum corneum and produces a jet which reaches the dermis are suitable. Ballistic powder/particle delivery devices which use compressed gas to accelerate the compound in powder form through the outer layers of the skin to the dermis are suitable.

[0470] Formulations suitable for topical administration include, but are not limited to, liquid and/or semi-liquid preparations such as liniments, lotions, oil-in-water and/or water-in-oil emulsions such as creams, ointments, and/or pastes, and/or solutions and/or suspensions. Topically administrable formulations may, for example, comprise from about 1% to about 10% (w/w) active ingredient, although the concentration of the active ingredient can be as high as the solubility limit of the active ingredient in the solvent. Formulations for topical administration may further comprise one or more of the additional ingredients described in this application.

[0471] A pharmaceutical composition described in this application can be prepared, packaged, and/or sold in a formulation suitable for pulmonary administration via the buccal cavity. Such a formulation may comprise dry particles which comprise the active ingredient and which have a diameter in the range from about 0.5 to about 7 nanometers, or from about 1 to about 6 nanometers. Such compositions are conveniently in the form of dry powders for administration using a device comprising a dry powder reservoir to which a stream of propellant can be directed to disperse the powder and/or using a self-propelling solvent/powder dispensing container such as a device comprising the active ingredient dissolved and/or suspended in a low-boiling propellant in a sealed container. Such powders comprise particles wherein at least 98% of the particles by weight have a diameter greater than 0.5 nanometers and at least 95% of the particles by number have a diameter less than 7 nanometers. Alternatively, at least 95% of the particles by weight have a diameter greater than 1 nanometer and at least 90% of the particles by number have a diameter less than 6 nanometers. Dry powder compositions may include a solid fine powder diluent such as sugar and are conveniently provided in a unit dose form.

[0472] Low boiling propellants generally include liquid propellants having a boiling point of below 65° F. at atmospheric pressure. Generally, the propellant may constitute 50 to 99.9% (w/w) of the composition, and the active ingredient may constitute 0.1 to 20% (w/w) of the composition. The propellant may further comprise additional ingredients such as a liquid non-ionic and/or solid anionic surfactant and/or a solid diluent (which may have a particle size of the same order as particles comprising the active ingredient).

[0473] Although the descriptions of pharmaceutical compositions provided in this application are principally directed to pharmaceutical compositions which are suitable for administration to humans, it will be understood by the skilled artisan that such compositions are generally suitable for administration to animals of all sorts. Modification of pharmaceutical compositions suitable for administration to humans in order to render the compositions suitable for administration to various animals is well understood, and the ordinarily skilled veterinary pharmacologist can design and/or perform such modification with ordinary experimentation.

[0474] Compounds provided in this application are typically formulated in dosage unit form for ease of administration and uniformity of dosage. It will be understood, however, that the total daily usage of the compositions described in this application will be decided by a physician within the scope of sound medical judgment. The specific therapeutically effective dose level for any particular subject or organism will depend upon a variety of factors including the disease being treated and the severity of the disorder; the activity of the specific active ingredient employed; the specific composition employed; the age, body weight, general health, sex, and diet of the subject; the time of administration, route of administration, and rate of excretion of the specific active ingredient employed; the duration of the treatment; drugs used in combination or coincidental with the specific active ingredient employed; and like factors well known in the medical arts.

[0475] The compounds and compositions provided in this application can be administered by any route, including enteral (e.g., oral), parenteral, intravenous, intramuscular, intra-arterial, intramedullary, intrathecal, subcutaneous, intraventricular, transdermal, interdermal, rectal, intravaginal, intraperitoneal, topical (as by powders, ointments, creams, and/or drops), mucosal, nasal, bucal, sublingual; by intratracheal instillation, bronchial instillation, and/or inhalation; and/or as an oral spray, nasal spray, and/or aerosol. Specifically contemplated routes are oral administration, intravenous administration (e.g., systemic intravenous injection), regional administration via blood and/or lymph supply, and/or direct administration to an affected site. In general, the most appropriate route of administration will depend upon a variety of factors including the nature of the agent (e.g., its stability in the environment of the gastrointestinal tract), and/or the condition of the subject (e.g., whether the subject is able to tolerate oral administration).

[0476] In some embodiments, compounds or compositions disclosed in this application are formulated and/or administered in nanoparticles. Nanoparticles are particles in the nanoscale. In some embodiments, nanoparticles are less than 1 μm in diameter. In some embodiments, nanoparticles are between about 1 and 100 nm in diameter. Nanoparticles include organic nanoparticles, such as dendrimers, liposomes, or polymeric nanoparticles. Nanoparticles also include inorganic nanoparticles, such as fullerenes, quantum dots, and gold nanoparticles. Compositions may comprise an aggregate of nanoparticles. In some embodiments, the aggregate of nanoparticles is homogeneous, while in other embodiments the aggregate of nanoparticles is heterogeneous.

[0477] The exact amount of a compound required to achieve an effective amount will vary from subject to subject, depending, for example, on species, age, and general condition of a subject, severity of the side effects or disorder, identity of the particular compound, mode of administration, and the like. An effective amount may be included in a single dose (e.g., single oral dose) or multiple doses (e.g., multiple oral doses). In certain embodiments, when multiple doses are administered to a subject or applied to a tissue or cell, any two doses of the multiple doses include different or substantially the same amounts of a compound described in this application. In certain embodiments, when multiple doses are administered to a subject or applied to a tissue or cell, the frequency of administering the multiple doses to the subject or applying the multiple doses to the tissue or cell is three doses a day, two doses a day, one dose a day, one dose every other day, one dose every third day, one dose every week, one dose every two weeks, one dose every three weeks, or one dose every four weeks. In certain embodiments, the frequency of administering the multiple doses to the subject or applying the multiple doses to the tissue or cell is one dose per day. In certain embodiments, the frequency of administering the multiple doses to the subject or applying the multiple doses to the tissue or cell is two doses per day. In certain embodiments, the frequency of administering the multiple doses to the subject or applying the multiple doses to the tissue or cell is three doses per day. In certain embodiments, when multiple doses are administered to a subject or applied to a tissue or cell, the duration between the first dose and last dose of the multiple doses is one day, two days, four days, one week, two weeks, three weeks, one month, two months, three months, four months, six months, nine months, one year, two years, three years, four years, five years, seven years, ten years, fifteen years, twenty years, or the lifetime of the subject, tissue, or cell. In certain embodiments, the duration between the first dose and last dose of the multiple doses is three months, six months, or one year. In certain embodiments, the duration between the first dose and last dose of the multiple doses is the lifetime of the subject, tissue, or cell. In certain embodiments, a dose (e.g., a single dose, or any dose of multiple doses) described in this application includes independently between 0.1 μg and 1 μg, between 0.001 mg and 0.01 mg, between 0.01 mg and 0.1 mg, between 0.1 mg and 1 mg, between 1 mg and 3 mg, between 3 mg and 10 mg, between 10 mg and 30 mg, between 30 mg and 100 mg, between 100 mg and 300 mg, between 300 mg and 1,000 mg, or between 1 g and 10 g, inclusive, of a compound described in this application. In certain embodiments, a dose described in this application includes independently between 1 mg and 3 mg, inclusive, of a compound described in this application. In certain embodiments, a dose described in this application includes independently between 3 mg and 10 mg, inclusive, of a compound described in this application. In certain embodiments, a dose described in this application includes independently between 10 mg and 30 mg, inclusive, of a compound described in this application. In certain embodiments, a dose described in this application includes independently between 30 mg and 100 mg, inclusive, of a compound described in this application.

[0478] Dose ranges as described in this application provide guidance for the administration of provided pharmaceutical compositions to an adult. The amount to be administered to, for example, a child or an adolescent can be determined by a medical practitioner or person skilled in the art and can be lower or the same as that administered to an adult.

[0479] A compound or composition, as described in this application, can be administered in combination with one or more additional pharmaceutical agents (e.g., therapeutically and/or prophylactically active agents). The compounds or compositions can be administered in combination with additional pharmaceutical agents that improve their activity, improve bioavailability, improve safety, reduce drug resistance, reduce and/or modify metabolism, inhibit excretion, and/or modify distribution in a subject or cell. It will also be appreciated that the therapy employed may achieve a desired effect for the same disorder, and/or it may achieve different effects. In certain embodiments, a pharmaceutical composition described in this application including a compound described in this application and an additional pharmaceutical agent shows a synergistic effect that is absent in a pharmaceutical composition including one of the compound and the additional pharmaceutical agent, but not both.

[0480] The compound or composition can be administered concurrently with, prior to, or subsequent to one or more additional pharmaceutical agents, which may be useful as, e.g., combination therapies. Pharmaceutical agents include therapeutically active agents. Pharmaceutical agents also include prophylactically active agents. Pharmaceutical agents include small organic molecules such as drug compounds (e.g., compounds approved for human or veterinary use by the U.S. Food and Drug Administration as provided in the Code of Federal Regulations (CFR)), peptides, proteins, carbohydrates, monosaccharides, oligosaccharides, polysaccharides, nucleoproteins, mucoproteins, lipoproteins, synthetic polypeptides or proteins, small molecules linked to proteins, glycoproteins, steroids, nucleic acids, DNAs, RNAs, nucleotides, nucleosides, oligonucleotides, antisense oligonucleotides, lipids, hormones, vitamins, and cells. In certain embodiments, the additional pharmaceutical agent is a pharmaceutical agent useful for treating and/or preventing a disease (e.g., proliferative disease, neurological disease, painful condition, psychiatric disorder, or metabolic disorder). Each additional pharmaceutical agent may be administered at a dose and/or on a time schedule determined for that pharmaceutical agent. The additional pharmaceutical agents may also be administered together with each other and/or with the compound or composition described in this application in a single dose or administered separately in different doses. The particular combination to employ in a regimen will take into account compatibility of the compound described in this application with the additional pharmaceutical agent(s) and/or the desired therapeutic and/or prophylactic effect to be achieved. In general, it is expected that the additional pharmaceutical agent(s) in combination be utilized at levels that do not exceed the levels at which they are utilized individually. In some embodiments, the levels utilized in combination will be lower than those utilized individually.

[0481] In some embodiments, one or more of the compositions described in this application are administered to a subject. In certain embodiments, the subject is an animal. The animal may be of either sex and may be at any stage of development. In certain embodiments, the subject is a human. In other embodiments, the subject is a non-human animal. In certain embodiments, the subject is a mammal. In certain embodiments, the subject is a non-human mammal. In certain embodiments, the subject is a domesticated animal, such as a dog, cat, cow, pig, horse, sheep, or goat. In certain embodiments, the subject is a companion animal, such as a dog or cat. In certain embodiments, the subject is a livestock animal, such as a cow, pig, horse, sheep, or goat. In certain embodiments, the subject is a zoo animal. In another embodiment, the subject is a research animal, such as a rodent (e.g., mouse, rat), dog, pig, or non-human primate.

[0482] Also encompassed by the disclosure are kits (e.g., pharmaceutical packs). The kits provided may comprise a composition, such as a pharmaceutical composition, or a compound described in this application and a container (e.g., a vial, ampule, bottle, syringe, and/or dispenser package, or other suitable container). In some embodiments, provided kits may optionally further include a second container comprising a pharmaceutical excipient for dilution or suspension of a pharmaceutical composition or compound described in this application. In some embodiments, the pharmaceutical composition or compound described in this application provided in the first container and the second container a combined to form one unit dosage form.

[0483] Thus, in one aspect, provided are kits including a first container comprising a compound or composition described in this application. In certain embodiments, the kits are useful for treating a disease in a subject in need thereof. In certain embodiments, the kits are useful for preventing a disease in a subject in need thereof. In certain embodiments, the kits are useful for reducing the risk of developing a disease in a subject in need thereof.

[0484] In certain embodiments, a kit described in this application further includes instructions for using the kit. A kit described in this application may also include information as required by a regulatory agency such as the U.S. Food and Drug Administration (FDA). In certain embodiments, the information included in the kits is prescribing information. In certain embodiments, the kits and instructions provide for treating a disease in a subject in need thereof. In certain embodiments, the kits and instructions provide for preventing a disease in a subject in need thereof. In certain embodiments, the kits and instructions provide for reducing the risk of developing a disease in a subject in need thereof. A kit described in this application may include one or more additional pharmaceutical agents described in this application as a separate composition.

[0485] The present invention is further illustrated by the following Examples, which in no way should be construed as limiting. The entire contents of all of the references (including literature references, issued patents, published patent applications, and co-pending patent applications) cited throughout this application are hereby expressly incorporated by reference. If a reference incorporated in this application contains a term whose definition is incongruous or incompatible with the definition of same term as defined in the present disclosure, the meaning ascribed to the term in this disclosure shall govern. However, mention of any reference, article, publication, patent, patent publication, and patent application cited in this disclosure is not, and should not be taken as an acknowledgment or any form of suggestion that they constitute valid prior art or form part of the common general knowledge in any country in the world.

### EXAMPLES

### Example 1: Functional Expression of Synthetic OAC Polypeptides

[0486] A library of synthetic OAC polypeptides was generated and screened in vivo in S. cerevisiae to identify polypeptides that were capable of producing olivetolic acid (OA). Each polypeptide comprised multiple amino acid substitutions or deletions relative to wild-type CsOAC (SEQ ID NO: 1).

[0487] For expression in S. cerevisiae, nucleotide sequences were recoded, synthesized, and cloned into a non-replicative yeast expression vector. Each candidate OAC expression construct was transformed and integrated into the genome of an S. cerevisiae CEN.PK strain previously engineered to produce olivetol by carrying a genomically integrated olivetol synthase (OLS).

[0488] The nucleic acid sequence of the genomically integrated OLS is provided by SEQ ID NO: 1316:

atgcccagtttagagtcagttaagaaatccaatcgtgccgacggcttcgc
atcgattctggctataggtagagctaaccctgaaaactttatcgaacagt
ctacatatccagatttctttttcagagtcaccaatagcgaacaccttgta
aacctaaagaaaaagttccaaagaatttgcgacaagactgctatcaggaa
gcgtcattttgtgtggaacgaagaattgttgaatgccaacccatgtttgg
gtacgtttatggataactcattaaacgtcagacaagaatttgctattaga
gagattccaaaactaggtgctgaagctgccactaaggcaatccaagaatg
gggtcaaccaaagtccagaataacccacttgatcttctgtactacctctg
gaatggatttgccaggtgctgactaccaattgacccaaattctgggtttg
aatcctaatattgagagggttatgttataccagcaaggttgtttcgctgg
tggtactactttgagattggccaaatgtttagccgaatctcgtaagggag
ctagagttttggttgtctgtgctgaaacaaccgctgttctattcagagca
ccttccgaagaacatcaagatgatttagtaactcaagctttgttcgccga
cggtgcttctgctcttatcgttggtgcagacccagacgagactgcccacg
aaagagctagttttgttattgtctctacatctcaagtcttgttaccagat
agcgctggtgctatcggcggtcatgtgtccgaaggtggtttgatcgccac
tttgcacagagatgttccacagatagttagcaaaaatgtcggtaagtgct
tggaagaagcattcacccccttgggtattagtgattggaacagtattttt
tgggttccacacccaggaggtagagctattcttgaccaagtggaagaaag
agtcggtttaaagcctgagaagttgatcgtatccagacatgtgttagccg
aatatggcaacatgtcttctgtttgtgttcactttgctctggatgaaatg
aggaagagatctaaaaaagaaggtaaggctacaaccggtgagggtttaga
ctggggtgttttgttcggcttcggtccaggattaactgtcgaaaccgtcg
ttttgcactctgttccaatataa.

[0489] The protein sequence of the genomically integrated OLS is provided by SEQ ID NO: 195:

MPSLESVKKSNRADGFASILAIGRANPENFIEQSTYPDFFFRVTNSEHLV
NLKKKFQRICDKTAIRKRHFVWNEELLNANPCLGTFMDNSLNVRQEFAIR
EIPKLGAEAATKAIQEWGQPKSRITHLIFCTTSGMDLPGADYQLTQILGL
NPNIERVMLYQQGCFAGGTTLRLAKCLAESRKGARVLVVCAETTAVLFRA
PSEEHQDDLVTQALFADGASALIVGADPDETAHERASFVIVSTSQVLLPD
SAGAIGGHVSEGGLIATLHRDVPQIVSKNVGKCLEEAFTPLGISDWNSIF
WVPHPGGRAILDQVEERVGLKPEKLIVSRHVLAEYGNMSSVCVHFALDEM
RKRSKKEGKATTGEGLDWGVLFGFGPGLTVETVVLHSVPI.

[0490] An assay for measuring production of olivetolic acid was conducted as follows: each thawed glycerol stock of OAC transformants was stamped into a well of YPD+4% dextrose media. Samples were incubated at 30° C. in a shaking incubator for 2 days. A portion of each of the resulting cultures was stamped into a well of YEP+2% raffinose+2% galactose+1 mM hexanoate (C6). Samples were incubated at 30° C. in a shaking incubator for 4 days. Additional spike-ins of 1 mM hexanoate and 2% galactose were added at 24 and 48 hours for a total of 3 mM hexanoate and 6% galactose feed. A portion of each of the resulting production cultures was stamped into a well of Phosphate Buffered Saline (PBS). Optical measurements were taken on a plate reader, with absorbance measured at 600 nm and fluorescence at 528 nm with 485 nm excitation. A portion of each of the production cultures was stamped into a well of 100% methanol in half-height deepwell plates. Plates were heat sealed and frozen at −80° C. for two hours. Samples were then thawed and spun down. A portion of the supernatant was stamped into half-area 96 well plates. Olivetolic acid production in the samples was measured via liquid chromatography-mass spectrometry (LC-MS) by measuring relative peak areas.

[0491] As shown in Table 4 and FIG. 6, multiple synthetic OAC polypeptides produced olivetolic acid (OA). For example, strains t703753, t618904, t618888, t618887, t618903, t618882, t733437, t618906, t618898, t733441, t618895, t618897, t618905, t618890, t703755, t618881, t733428, t733449, t618889, t733444, t703754, t618874, t733442, t618876, t618879, t618908, t618915, t733453, t618900, t618913, t618878, t703752, t618884, t618893, t733455, and t621324 produced at least 47,000 μg/L olivetolic acid. Surprisingly, strains comprising several non-conservative amino acid substitutions were capable of producing olivetolic acid. Non-conservative amino acid substitutions are indicated in bold font and are underlined in Table 4.

TABLE 4
Activity data for synthetic OAC polypeptides in S. cerevisiae

| | | Average | Standard Deviation |
|---|---|---|---|
| | Amino acid substitutions relative to | Olivetolic Acid | Olivetolic Acid |
| Strain | SEQ ID NO: 1 | [μg/L] | [μg/L] |
| t621327 | — | 83112.99 | 3180.61 |
| t703753 | A18D T26A V28E N29S E53H E60I | 71051.94 | 4357.89 |
| | Q70L G82K D83A S87K | | |
| t618904 | A18D E22K N29S E53H Q70L G82K | 67803.84 | 5130.069 |
| | D83R S87K F88Y | | |
| t618888 | A18D E22K N29S E53H Q70L G82K | 65943.84 | 3771.639 |
| | D83R S87K F88Y | | |
| t703754 | A18D E22K T26A N29S E53H Q70L | 61898.15 | 13873.5 |
| | G82K D83A F88Y | | |
| t618887 | A18D E22K N29S E53H Q70L G82K | 61157.09 | 4988.12 |
| | D83K S87K F88Y | | |
| t733437 | A18D E22K K25N T26A N29S E53H | 60924.63 | 3069.983 |
| | Q70L G82K D83A S87K | | |
| t618903 | A18D E22K N29S E53H Q70L G82K | 60664.32 | 6048.762 |
| | D83K S87K F88Y | | |
| t618882 | A18D E22K N29S I33R E53H Q70L | 59371.51 | 4972.507 |
| | G82K D83A S87K F88Y | | |
| t618906 | A18D E22K N29S E53H Q70L G82K | 58293.9 | 3409.644 |
| | D83A V84K S87K F88Y | | |
| t618898 | A18D E22K N29S I33R E53H Q70L | 57987.09 | 7114.668 |
| | G82K D83A S87K F88Y | | |
| t733441 | A18D E22K T26A N29S E53H Q70L | 56814.63 | 2333.956 |
| | G82K D83A S87K F88Y | | |
| t618895 | A18D E22K T26H N29S E53H Q70L | 56466.43 | 3350.318 |
| | G82K D83A S87K F88Y | | |
| t618897 | A18D E22K N29S I33H E53H Q70L | 56240.63 | 4550.125 |
| | G82K D83A S87K F88Y | | |
| t618905 | A18D E22K N29S E53H Q70L G82K | 55458.68 | 2234.887 |
| | D83A V84F S87K F88Y | | |
| t618890 | A18D E22K N29S E53H Q70L G82K | 55344.53 | 6117.93 |
| | D83A V84K S87K F88Y | | |
| t703755 | A18D T26A N29S E53H Q70L G82K | 55243.23 | 7240.143 |
| | D83A F88Y | | |
| t618881 | A18D E22K N29S I33H E53H Q70L | 53817.65 | 3411.585 |
| | G82K D83A S87K F88Y | | |
| t733428 | A18D E22K T26A N29S E53H Q70L | 53764.98 | 5289.474 |
| | G82K D83A S87K | | |
| t733449 | A18D T26A N29S E53H Q70L G82K | 53104.9 | 5995.439 |
| | D83A S87K F88Y | | |
| t618889 | A18D E22K N29S E53H Q70L G82K | 51897.8 | 3218.588 |
| | D83A V84F S87K F88Y | | |
| t733444 | A18D T26A N29S E53H Q70L G82K | 51530.41 | 4992.193 |
| | D83A | | |
| t618874 | A18D E22K N29S E53H Q70L G82K | 50868.29 | 7037.235 |
| | D83A S87K F88Y | | |
| t733442 | A18D T26A V28E N29S E53H Q70L | 50754.38 | 3412.802 |
| | G82K D83A S87K | | |
| t618876 | A18R E22K N29S E53H Q70L G82K | 50737.94 | 4477.936 |
| | D83A S87K F88Y | | |
| t618879 | A18D E22K T26H N29S E53H Q70L | 50677.48 | 4527.628 |
| | G82K D83A S87K F88Y | | |
| t618908 | d2 A18D E22K N29S E53H Q70L | 50660.38 | 2210.721 |
| | G82K D83A S87K F88Y | | |
| t618915 | A18D E22K N29S E53H T62M Q70L | 50223.45 | 2855.212 |
| | G82K D83A S87K F88Y | | |
| t733453 | A18D E22K T26A N29E E53H Q70L | 50179.68 | 1547.743 |
| | G82K D83A S87K | | |
| t618900 | A18D E22K N29S E52H E53H Q70L | 50081.71 | 2759.643 |
| | G82K D83A S87K F88Y | | |
| t618913 | A18D E22K N29S E53H Q70L G82K | 49877.07 | 1495.849 |
| | D83A S87C F88Y | | |
| t618878 | A18D E22K F24M N29S E53H Q70L | 49593.19 | 3181.27 |
| | G82K D83A S87K F88Y | | |
| t703752 | A18D N29S E53H Q70L G82K D83A | 49167.24 | 9067.041 |
| | F88Y | | |
| t618884 | A18D E22K N29S E52H E53H Q70L | 48455.36 | 2418.536 |
| | G82K D83A S87K F88Y | | |
| t618893 | A18R E22K N29S E53H Q70L G82K | 48255.78 | 2355.544 |
| | D83A S87K F88Y | | |
| t733455 | A18D N29S E53H Q70L G82K D83A | 47534.07 | 3782.694 |
| | S87K F88Y | | |
| t621324 | A18D E22K T26A N29S E53H H57Y | 47010.07 | 2707.421 |
| | Q70L G82K D83A S87K | | |
| t618875 | D13R A18D E22K N29S E53H Q70L | 46880.2 | 3653.498 |
| | G82K D83A S87K F88Y | | |
| t618914 | A18D E22K N29S E53H Q70L G82K | 46846.9 | 1542.364 |
| | D83A S87C F88Y | | |
| t733451 | A18D N29S E53H Q70L G82K D83A | 46536.01 | 3940.882 |
| | S87K | | |
| t733431 | A18D T26A N29S E53H Q70L G82K | 46094.45 | 2385.012 |
| | D83A S87K | | |
| t618892 | D13R A18D E22K N29S E53H Q70L | 45895.72 | 2437.177 |
| | G82K D83A S87K F88Y | | |
| t618877 | A18D K20A E22K N29S E53H Q70L | 45775.07 | 1698.94 |
| | G82K D83A S87K F88Y | | |
| t618883 | A18D E22K N29S N50K E53H Q70L | 45393.22 | 1956.514 |
| | G82K D83A S87K F88Y | | |
| t733424 | A18D E22K N29S E53H Q70L G82K | 45209.24 | 2590.566 |
| | D83A S87K | | |
| t733420 | A18D T26A V28E N29S E53H Q70L | 44644.47 | 2371.943 |
| | G82K D83A S87K F88Y | | |
| t618894 | A18D K20A E22K N29S E53H Q70L | 44242.37 | 4051.608 |
| | G82K D83A S87K F88Y | | |
| t618896 | A18D E22K T26R N29S E53H Q70L | 41915.47 | 14867.75 |
| | G82K D83A S87K F88Y | | |
| t703756 | A18D N29S E53H H57Y Q70L G82K | 41188.71 | 6817.98 |
| | D83A S87K F88Y | | |
| t618886 | A18D E22K N29S E53H Q70L G80V | 39008.2 | 3100.816 |
| | G82K D83A S87K F88Y | | |
| t733447 | A18D E22K T26A N29S E53H Q70L | 36277.48 | 7873.193 |
| | G82K D83A | | |
| t618880 | A18D E22K T26R N29S E53H Q70L | 34821.62 | 3825.626 |
| | G82K D83A S87K F88Y | | |
| t733450 | A18D E22K N29S E53H E60I Q70L | 34644.28 | 20796.55 |
| | G82K D83A S87K | | |
| t733448 | A18D E22K T26A N29S E53H E60I | 34154.85 | 11909.31 |
| | Q70L G82K D83A | | |
| t733446 | A18D E22K T26A N29E E53H E60I | 33517.33 | 11449.4 |
| | Q70L G82K D83A S87K | | |
| t733438 | A18D K25N T26A N29S E53H E60I | 32638.74 | 10813.33 |
| | Q70L G82K D83A F88Y | | |
| t618902 | A18D E22K N29S E53H Q70L G80V | 32116.82 | 614.0084 |
| | G82K D83A S87K F88Y | | |
| t733423 | A18D E22K N29S E53H E60I Q70L | 30463.15 | 11691.4 |
| | G82K D83A S87K F88Y | | |
| t733434 | A18D T26A N29S E53H E60I Q70L | 29507.28 | 12923.24 |
| | G82K D83A F88Y | | |
| t618907 | A18D E22K N29S E53H Q70L G82K | 28120.06 | 1367.604 |
| | D83A Y85A S87K F88Y | | |
| t733456 | A18D E22K K25N T26A N29S E53H | 27966.55 | 10615.38 |
| | E60I Q70L G82K D83A F88Y | | |
| t733452 | A18D T26A V28E N29S E53H E60I | 27469.17 | 18457.2 |
| | Q70L G82K D83A S87K F88Y | | |
| t733454 | A18D E22K T26A N29S E53H E60I | 26853.01 | 7215.242 |
| | Q70L G82K D83A S87K | | |
| t733432 | A18D E22K T26A V28E N29S E53H | 26554.45 | 10446.36 |
| | E60I Q70L G82K D83A S87K F88Y | | |
| t618891 | A18D E22K N29S E53H Q70L G82K | 26231.71 | 1524.903 |
| | D83A Y85A S87K F88Y | | |
| t621326 | A18D K25N T26A N29S E53H E60I | 25650.15 | 13084.44 |
| | Q70L G82K D83A S87K F88Y | | |
| t733440 | A18D T26A N29S E53H E60I Q70L | 24860.86 | 17040.81 |
| | G82K D83A | | |
| t618899 | A18D E22K N29S N50K E53H Q70L | 24523.8 | 23062.39 |
| | G82K D83A S87K F88Y | | |
| t733421 | A18D N29S E53H E60I Q70L G82K | 23409.49 | 11929.06 |
| | D83A F88Y | | |
| t733429 | A18D N29S E53H E60I Q70L G82K | 23282.18 | 10836.94 |
| | D83A S87K | | |
| t621323 | A18D E22K T26A V28E N29S E53H | 22223.72 | 8285.182 |
| | E60I Q70L G82K D83A S87K | | |
| t733445 | A18D E22K K25N T26A N29S E53H | 21167.38 | 7497.625 |
| | E60I Q70L G82K D83A S87K F88Y | | |
| t733433 | A18D E22K T26A N29S E53H E60I | 20135.18 | 6451.948 |
| | Q70L G82K D83A F88Y | | |
| t621325 | A18D K25N T26A N29S E53H E60I | 19974.38 | 17388.96 |
| | Q70L G82K D83A S87K | | |
| t733426 | A18D N29S E53H E60I Q70L G82K | 19865.77 | 9768.158 |
| | D83A S87K F88Y | | |
| t733419 | A18D T26A V28E N29S E53H E60I | 19051.88 | 15141.84 |
| | Q70L G82K D83A F88Y | | |
| t733422 | A18D T26A N29S E53H E60I Q70L | 18987.74 | 6139.826 |
| | G82K D83A S87K I94V | | |
| t618901 | A18D E22K N29S E53H T56Y Q70L | 17945.17 | 1633.593 |
| | G82K D83A S87K F88Y | | |
| t618885 | A18D E22K N29S E53H T56Y Q70L | 17226.74 | 670.601 |
| | G82K D83A S87K F88Y | | |
| t733430 | A18D T26A N29S E53H E60I Q70L | 16745.01 | 3271.252 |
| | G82K D83A S87K | | |
| t733439 | A18D E22K K25N T26A N29S E53H | 16244.41 | 5970.461 |
| | E60I Q70L G82K D83A S87K | | |
| t733443 | A18D E22K T26A V28E N29S E53H | 15979.92 | 1466.996 |
| | E60I Q70L G82K D83A F88Y | | |
| t733427 | A18D T26A N29S E53H E60I Q70L | 13124.14 | 1823.281 |
| | G82K D83A S87K F88Y | | |
| t733436 | A18D V28E N29S E53H E60I Q70L | 13096.49 | 7004.152 |
| | G82K D83A S87K | | |
| t733435 | A18D E22K N29S E53H H57Y E60I | 12261.54 | 10276.08 |
| | Q70L G82K D83A S87K | | |
| t618909 | A18R K20A E22K T26R N29S I33R | 4214.472 | 429.7709 |
| | N50K E53H T56Y Q70L G82K D83K | | |
| | V84K Y85A S87K F88Y | | |
| t618911 | A18R K20A E22K T26R N29S I33R | 4191.066 | 433.3006 |
| | N50K E53H T56Y Q70L G82K D83K | | |
| | V84K Y85A S87K F88Y | | |
| t618910 | A18R K20A E22K T26R N29S I33R | 4030.05 | 468.0208 |
| | N50K E53H T56Y Q70L G82K D83K | | |
| | V84K Y85A S87K F88Y | | |
| t618912 | A18R K20A E22K T26R N29S I33R | 3845.85 | 709.8007 |
| | N50K E53H T56Y Q70L G82K D83K | | |
| | V84K Y85A S87K F88Y | | |

### Example 2: Identification of Combinatorially Mutated OAC Polypeptides that are Capable of Producing Olivetolic Acid

[0492] Example 1 describes a library of synthetic OAC polypeptides that demonstrated production of olivetolic acid (OA) in vivo in S. cerevisiae. However olivetol (OL), a by-product generated by the spontaneous, decarboxylative cyclization of 3,5,7-trioxododecanoyl-CoA generated by olivetol synthase (FIG. 1 R2a), was also generated in vivo in S. cerevisiae strains incorporating the synthetic OAC polypeptides. No known enzyme has been demonstrated to utilize OL in meaningful amounts to generate the decarboxylated variants of other cannabinoids (e.g., a prenyltransferase capable of prenylating OL with geranyl diphosphate to form cannabigerol). Consequently, OL is considered an unwanted carbon sink for the biosynthesis of cannabinoids and its production should be minimized.

[0493] A library of synthetic OAC polypeptides was generated in which the polypeptides included multiple point mutations selected from a set of 230 different point mutations relative to the wild type C. sativa OAC. Strains expressing the point mutations were assessed in vivo in S. cerevisiae for both the generation of OA and the minimization of OL production. This latter metric was assessed by calculating the OA/OL ratio of each point mutant. For expression in S. cerevisiae, nucleotide sequences were recoded, synthesized, and cloned into a 2p replicative yeast expression vector. Each candidate OAC expression construct was transformed into a S. cerevisiae CEN.PK strain previously engineered to produce olivetol by carrying a genomically integrated olivetol synthase as in Example 1. Strains t442707, t442710, and t454529, expressing three different recoded variants of CsOAC, were included in the library as positive controls. Strain t442712, expressing a fluorescent protein (GFP), was included in the library as a negative control for enzyme activity.

[0494] An assay for measuring production of olivetolic acid was conducted as follows: each thawed glycerol stock of OAC transformants was stamped into a well of YPD+4% dextrose media. Samples were incubated at 30° C. in a shaking incubator for 2 days. A portion of each of the resulting cultures was stamped into a well of YEP+2% raffinose+2% galactose+1 mM hexanoate (C6). Samples were incubated at 30° C. in a shaking incubator for 4 days. Additional spike-ins of 1 mM hexanoate and 2% galactose were added at 24 and 48 hours for a total of 3 mM hexanoate and 6% galactose feed. A portion of each of the resulting production cultures was stamped into a well of PBS. Optical measurements were taken on a plate reader, with absorbance measured at 600 nm and fluorescence at 528 nm with 485 nm excitation. A portion of each of the production cultures was stamped into a well of 100% methanol in half-height deepwell plates. Plates were heat sealed and frozen at −80° C. for two hours. Samples were then thawed and spun down. A portion of the supernatant was stamped into half-area 96 well plates. Olivetolic acid and olivetol production in the samples were quantified via LC-MS.

[0495] Two criteria were applied to the results of this assay to determine hits: the generation of an OA titer greater than 400 μg/L, and an OA/OL ratio greater than or equal to 0.7 (shaded region FIG. 8). Strains incorporating OAC polypeptides with mutations at 13 different residues, representing 19 point mutations (e.g. E17N, A18D, T26A, T26H, N29T, V31L, I33R, I33H, I33N, M37L, D39Q, D39G, D71S, G80A, D83Q, D83N, D83A, V84F, and F₉₅M) satisfied both criteria (Table 5). These point mutations were combined into CsOAC variants having multiple mutations in a library containing 937 synthetic OACs which was screened both for production of OA and OA/OL titer greater than or equal to 70%. For expression in S. cerevisiae, nucleotide sequences were recoded, synthesized, and cloned into an integrative yeast expression vector. Each candidate OAC expression construct was transformed into a S. cerevisiae CEN.PK strain previously engineered to produce olivetol by carrying a genomically integrated olivetol synthase as in Example 1. Strains t782504, expressing wild-type CsOAC (SEQ ID NO: 1), was included in the library as a positive control. Strain t621324, expressing a CsOAC variant containing a combination of 10 point mutations relative to the CsOAC sequence, was included in the library as positive control for hit ranking. Strain t782404, expressing a fluorescent protein (GFP), was included in the library as a negative control for enzyme activity.

[0496] 99 of the multiply-mutated CsOAC variants were selected and a secondary screen performed to confirm their activity (FIGS. 9A-9B and with mutations shown in Table 6). FIG. 9A shows olivetolic acid production by each synthetic OAC and FIG. 9B shows the ratio of OA:OL. 65% of the library demonstrated a mean OA titer, and 70% demonstrated a mean OA/OL ratio, greater than that of the t782504 positive control. To determine which individual mutations within the multiply-mutated CsOAC variants increased OA titer and/or the OA/OL ratio, hits were first segregated into groups. Each CsOAC variant was represented as a 1×20 vector containing mixed categorical and numerical data. Dimensions of each vector represented whether an OAC carried the wild-type residue at each of the possible mutated positions or one of the possible mutations. 2 dimensions of each vector represented the mean olivetolic acid titer and OA/OL ratio associated with a specific OAC.

[0497] A library of 75 synthetic OACs was generated from a combination of nine mutations (E17N, A18D, N29T, V31L, I33N, D39Q, D71S, D83A, and V84F). Each strain tested in the library contained 6 of these amino acid substitutions. An assay for measuring production of olivetolic acid was conducted as follows: each thawed glycerol stock of OAC transformants was stamped into a well of YPD+4% dextrose media. Samples were incubated at 30° C. in a shaking incubator for 2 days. A portion of each of the resulting cultures was stamped into a well of YEP+2% raffinose+2% galactose+1 mM hexanoate (C₆). Samples were incubated at 30° C. in a shaking incubator for 4 days. Additional spike-ins of 1 mM hexanoate and 2% galactose were added at 24 and 48 hours for a total of 3 mM hexanoate and 6% galactose feed. A portion of each of the resulting production cultures was stamped into a well of PBS. Optical measurements were taken on a plate reader, with absorbance measured at 600 nm and fluorescence at 528 nm with 485 nm excitation. A portion of each of the production cultures was stamped into a well of 100% methanol in half-height deepwell plates. Plates were heat sealed and frozen at −80° C. for two hours. Samples were then thawed and spun down. A portion of the supernatant was stamped into half-area 96 well plates. Olivetolic acid and olivetol production in the samples were quantified via LC-MS. Strains t815873, t815900 and t815854 produced a mean OA titer that is greater than the CsOAC positive control. Strains t815873, t815900 and t815854 generated a mean OA titer greater than 41,000 μg/L and a mean OA/OL ratio greater than 3.1 (FIGS. 10A-10B and Table 7).

TABLE 5
Activity data for synthetic OAC polypeptides in
S. cerevisiae described in Example 2 and FIG. 8.

| | | Mutations relative to | Average | Average |
|---|---|---|---|---|
| | Strain | CsOAC | Olivetolic Acid | OA/OL |
| Strain | type | (SEQ ID NO: 1) | [μg/L] | ratio |
| t500610 | Library | I33R | 650.21 | 0.95 |
| t500726 | Library | D83Q | 552.41 | 0.85 |
| t500710 | Library | V84F | 544.78 | 0.83 |
| t500269 | Library | A18D | 618.04 | 0.82 |
| t500435 | Library | D83N | 686.58 | 0.82 |
| t500492 | Library | F95M | 527.47 | 0.80 |
| t500431 | Library | G80A | 670.57 | 0.76 |
| t500267 | Library | D83A | 631.72 | 0.74 |
| t500294 | Library | D39Q | 462.16 | 0.74 |
| t500693 | Library | I33H | 665.47 | 0.74 |
| t500192 | Library | I33N | 462.07 | 0.73 |
| t500544 | Library | N29T | 533.34 | 0.73 |
| t500289 | Library | D39G | 631.43 | 0.72 |
| t500701 | Library | V31L | 570.68 | 0.72 |
| t500588 | Library | D71S | 459.91 | 0.72 |
| t500274 | Library | T26A | 455.98 | 0.72 |
| t500213 | Library | E17N | 440.70 | 0.72 |
| t500440 | Library | M37L | 526.31 | 0.71 |
| t500137 | Library | T26H | 668.56 | 0.70 |
| t454529 | CsOAC | — | 245.69 | 0.67 |
| | positive | | | |
| | control | | | |
| t442707 | CsOAC | — | 299.15 | 0.61 |
| | positive | | | |
| | control | | | |
| t442710 | CsOAC | — | 286.12 | 0.58 |
| | positive | | | |
| | control | | | |
| t442712 | GFP | — | 29.18 | 0.03 |
| | negative | | | |
| | control | | | |

TABLE 6
Activity data for synthetic OAC polypeptides in S. cerevisiae
described in Example 2 and FIGS. 9A-9B.

| | | | Standard | | |
|---|---|---|---|---|---|
| | | | Deviation | | Standard |
| | | | Olivetolic | Average | Deviation |
| | Mutations relative to | Average Olivetolic | Acid | OA/OL | OA/OL |
| Strain | CsOAC (SEQ ID NO: 1) | Acid [ug/L] | [ug/L] | ratio | ratio |
| t782739 | [A18D, M37L] | 131500 | 26162.95 | 4.15 | 0.82 |
| t782870 | [E17N, T26A, M37L] | 106000 | 5830.95 | 2.96 | 1.48 |
| t782864 | [V31L, D39G, V84F] | 122000 | 20412.41 | 2.93 | 0.87 |
| t782665 | [E17N, I33R, F95M] | 142750 | 16997.55 | 2.73 | 1.11 |
| t782592 | [N29T, D39G, V84F] | 110800 | 21982.42 | 2.69 | 1.25 |
| t782657 | [D39Q, F95M] | 151500 | 5446.71 | 2.66 | 0.27 |
| t782810 | [E17N, A18D, I33N] | 130500 | 31819.81 | 2.65 | 0.57 |
| t783213 | [E17N, M37L, D83Q] | 70425 | 27893.65 | 2.64 | 1.58 |
| t783081 | [E17N, A18D, D39G] | 161500 | 16263.46 | 2.63 | 0.17 |
| t783074 | [I33H, D39G, D83Q] | 113500 | 14849.24 | 2.62 | 0.09 |
| t783309 | [A18D, D39Q, D71S] | 122375 | 18634.09 | 2.48 | 0.21 |
| t782463 | [N29T, I33N, D71S] | 134975 | 51662.39 | 2.45 | 1.05 |
| t783320 | [E17N, D39G, D83A] | 109450 | 16133.09 | 2.42 | 0.22 |
| t783220 | [D39G, D71S] | 119900 | 28999.54 | 2.38 | 0.52 |
| t783200 | [E17N, D83N, F95M] | 103375 | 11190.58 | 2.37 | 0.57 |
| t783299 | [E17N, T26H, N29T] | 93050 | 8327.66 | 2.33 | 0.15 |
| t782468 | [V31L, D39G, D71S] | 117000 | 9380.83 | 2.31 | 0.22 |
| t783215 | [I33R, D39G, D71S] | 115925 | 28962.89 | 2.27 | 0.54 |
| t782480 | [N29T, I33H, D71S] | 101775 | 18170.01 | 2.27 | 0.33 |
| t783302 | [A18D, N29T, V31L] | 115500 | 5196.15 | 2.24 | 0.73 |
| t783164 | [N29T, I33N] | 105750 | 11667.26 | 2.21 | 0.16 |
| t782641 | [E17N, D71S, G80A] | 93875 | 9591.79 | 2.17 | 0.21 |
| t782446 | [V31L, D71S, D83Q] | 121375 | 17594.39 | 2.17 | 0.47 |
| t782747 | [A18D, V31L, D39G] | 128650 | 29506.33 | 2.15 | 0.47 |
| t783280 | [E17N, D39G] | 81550 | 19849.52 | 2.14 | 0.15 |
| t783313 | [E17N, I33H, D71S] | 119000 | 2160.25 | 2.13 | 0.35 |
| t783337 | [N29T, V31L, D39Q] | 129250 | 23414.74 | 2.12 | 0.65 |
| t783186 | [I33H, D39Q, D71S | 136250 | 6184.66 | 2.10 | 0.73 |
| t782920 | [D39Q, D71S, D83A] | 114000 | 18565.20 | 2.09 | 0.24 |
| t782554 | [N29T, D39G] | 129750 | 15924.30 | 2.06 | 0.27 |
| t782634 | [E17N, I33R, D39Q] | 125425 | 30202.47 | 2.05 | 0.35 |
| t782649 | [I33N, F95M] | 145500 | 14364.31 | 2.03 | 0.19 |
| t783298 | [A18D, T26H, D39Q] | 113575 | 26853.72 | 1.99 | 0.13 |
| t783333 | [T26H, D39Q] | 79200 | 19386.77 | 1.98 | 0.74 |
| t783289 | [V31L, D71S, D83N] | 103125 | 22393.95 | 1.98 | 0.29 |
| t782627 | [T26H, N29T, D39Q] | 128000 | 8485.28 | 1.97 | 0.25 |
| t783214 | [E17N, V31L, I33N] | 106875 | 12300.51 | 1.97 | 0.18 |
| t782407 | [D71S, D83N, F95M] | 132250 | 24088.38 | 1.91 | 0.40 |
| t783256 | [V31L, I33H, D71S] | 117500 | 14200.94 | 1.89 | 0.55 |
| t783216 | [I33R, D39G, F95M] | 112650 | 30138.96 | 1.88 | 0.20 |
| t782411 | [D39G, D71S, D83N] | 121750 | 7410.58 | 1.84 | 0.13 |
| t783171 | [N29T, I33R, D39Q] | 121850 | 27560.06 | 1.83 | 0.13 |
| t782395 | [T26A, D39Q, D83Q] | 84175 | 20696.11 | 1.80 | 0.39 |
| t783182 | [A18D, D39Q, V84F] | 126000 | 13735.60 | 1.80 | 0.17 |
| t783318 | [A18D, T26H, F95M] | 95400 | 16849.93 | 1.80 | 0.28 |
| t782447 | [I33R, D39G, D83N] | 109025 | 11593.21 | 1.79 | 0.26 |
| t782677 | [T26A, V31L, D39Q] | 106950 | 23892.19 | 1.79 | 0.69 |
| t782487 | [E17N, I33N, F95M] | 123500 | 14849.24 | 1.78 | 0.36 |
| t782593 | [T26H, D83Q, F95M] | 137250 | 5500.00 | 1.76 | 0.19 |
| t782654 | [D39Q, D71S, G80A] | 126250 | 13913.42 | 1.75 | 0.26 |
| t782476 | [E17N, N29T, G80A] | 81300 | 23963.03 | 1.74 | 0.91 |
| t783326 | [V31L, D39G, F95M] | 100825 | 10236.66 | 1.74 | 0.37 |
| t782558 | [D39G, D71S, V84F] | 130500 | 11818.07 | 1.73 | 0.38 |
| t782415 | [D39Q, D83Q] | 131750 | 10436.31 | 1.73 | 0.19 |
| t783143 | [T26A, N29T, I33H] | 127900 | 42706.32 | 1.68 | 0.60 |
| t783165 | [I33N, D39Q, F95M] | 132500 | 23388.03 | 1.67 | 0.13 |
| t782460 | [V31L, D83N, V84F] | 95275 | 23936.77 | 1.66 | 0.13 |
| t783329 | [E17N, T26A, D39G] | 122750 | 18589.87 | 1.62 | 0.23 |
| t782497 | [A18D, D39Q] | 116125 | 17712.40 | 1.61 | 0.16 |
| t783294 | [V31L, I33R] | 96066.66667 | 4833.56 | 1.60 | 0.19 |
| t783204 | [T26H, N29T, V84F] | 97400 | 19233.30 | 1.59 | 0.13 |
| t783172 | [V31L, I33R, D83N] | 111075 | 21233.21 | 1.59 | 0.21 |
| t782589 | [E17N, I33N, V84F] | 109450 | 18432.13 | 1.58 | 0.37 |
| t783217 | [N29T, I33N, D83Q] | 109125 | 18220.02 | 1.58 | 0.35 |
| t783210 | [N29T, V31L] | 104300 | 8061.02 | 1.57 | 0.14 |
| t783160 | [I33R, F95M] | 103350 | 25286.29 | 1.56 | 0.11 |
| t782674 | [A18D, T26H] | 83475 | 14618.34 | 1.53 | 0.49 |
| t783126 | [T26H, I33H, D83Q] | 83350 | 15627.06 | 1.53 | 0.15 |
| t782504 | N/A (Wild-type Control) | 105480 | 18803.59 | 1.52 | 0.32 |
| t783089 | [T26A, N29T, I33R] | 102925 | 11378.74 | 1.51 | 0.34 |
| t782405 | [D71S, D83Q] | 109650 | 18192.58 | 1.51 | 0.54 |
| t782673 | [T26A, F95M] | 113575 | 23737.22 | 1.51 | 0.30 |
| t782477 | [I33H, D39Q, G80A] | 109600 | 20465.09 | 1.50 | 0.12 |
| t782451 | [I33N, D39G, D83Q] | 100625 | 8775.11 | 1.47 | 0.10 |
| t783324 | [T26H, D39G, V84F] | 119000 | 4898.98 | 1.47 | 0.35 |
| t782604 | [D39G, D83A] | 84975 | 2382.40 | 1.47 | 0.18 |
| t782464 | [E17N, T26A, N29T] | 96625 | 7191.84 | 1.46 | 0.30 |
| t782423 | [T26A, D83N, F95M] | 118000 | 9933.11 | 1.45 | 0.13 |
| t782833 | [A18D, I33R, D39G] | 118500 | 2121.32 | 1.44 | 0.06 |
| t782669 | [E17N, D71S, F95M] | 124325 | 21002.12 | 1.44 | 0.21 |
| t782443 | [T26H, V31L, D83A] | 96975 | 4885.61 | 1.44 | 0.43 |
| t783316 | [T26H, D39Q, D83Q] | 102250 | 10803.24 | 1.42 | 0.23 |
| t782645 | [N29T, V31L, D83N] | 91175 | 27712.26 | 1.38 | 0.27 |
| t783288 | [E17N, G80A, D83N] | 115750 | 13225.61 | 1.37 | 0.46 |
| t782459 | [I33H, D83Q, F95M] | 107650 | 17249.83 | 1.36 | 0.25 |
| t782678 | [N29T, D39G, D83N] | 103000 | 11313.71 | 1.33 | 0.22 |
| t783151 | [A18D, D71S, G80A] | 129300 | 28311.83 | 1.32 | 0.20 |
| t782661 | [I33N, D71S, G80A] | 109100 | 17630.66 | 1.29 | 0.16 |
| t782646 | [I33R, D83A] | 90475 | 11315.88 | 1.27 | 0.21 |
| t782419 | [T26H, N29T, I33R] | 105225 | 21279.16 | 1.26 | 0.27 |
| t782467 | [T26H, I33N, G80A] | 113100 | 16245.20 | 1.26 | 0.34 |
| t782481 | [D83N, F95M] | 91175 | 7944.13 | 1.26 | 0.12 |
| t783211 | [E17N, T26A, G80A] | 85150 | 28828.05 | 1.25 | 0.16 |
| t782428 | [I33R, D39Q, V84F] | 120250 | 9287.09 | 1.24 | 0.11 |
| t782442 | [T26H, I33R, G80A] | 88550 | 15858.02 | 1.21 | 0.19 |
| t782403 | [T26A, N29T] | 108925 | 10684.37 | 1.18 | 0.04 |
| t782653 | [T26A, N29T, V31L] | 123250 | 9912.11 | 1.17 | 0.07 |
| t782472 | [T26H, V31L, D83N] | 92400 | 5273.83 | 1.16 | 0.16 |
| t782666 | [T26H, D83N] | 104925 | 13907.64 | 1.15 | 0.14 |
| t783176 | [E17N, T26H, M37L] | 79175 | 12900.48 | 1.07 | 0.43 |
| t621324 | [A18D E22K T26A N29S | 55637.5 | 9750.01 | 0.66 | 0.09 |
| | E53H H57Y Q70L G82K | | | | |
| | D83A S87K] | | | | |
| t782404 | N/A (GFP control) | 42837.5 | 6759.11 | 0.32 | 0.04 |

TABLE 7
Activity data for synthetic OAC polypeptides in S. cerevisiae
described in Example 2 and FIGS. 10A-10B.

| | | Average | | | |
|---|---|---|---|---|---|
| | Mutations relative | Olivetolic | Standard Deviation | Average | Standard |
| | to CsOAC | Acid | Olivetolic Acid | OA/OL | Deviation OA/OL |
| Strain | (SEQ ID NO: 1) | [μg/L] | [μg/L] | ratio | ratio |
| t815866 | [A18D, N29T, | 35749.00 | 4645.51 | 3.53 | 0.67 |
| | V31L, I33N, D71S, | | | | |
| | D83A] | | | | |
| t815873 | [E17N, A18D, | 47197.14 | 4955.33 | 3.26 | 0.44 |
| | V31L, D39Q, D71S, | | | | |
| | D83A] | | | | |
| t815900 | [E17N, A18D, | 41329.14 | 3257.12 | 3.19 | 0.82 |
| | V31L, D71S, D83A, | | | | |
| | V84F] | | | | |
| t815854 | [A18D, V31L, | 41449.30 | 1578.33 | 3.18 | 0.28 |
| | D39Q, D71S, D83A, | | | | |
| | V84F] | | | | |
| t782504 | N/A (wild-type | 40344.42 | 4937.39 | 3.09 | 0.75 |
| (CsOAC | CsOAC) | | | | |
| control) | | | | | |
| t815880 | [A18D, N29T, | 43303.03 | 9974.64 | 3.01 | 0.34 |
| | V31L, D71S, D83A, | | | | |
| | V84F] | | | | |
| t815889 | [A18D, V31L, I33N, | 40807.95 | 4219.60 | 3.01 | 0.07 |
| | D71S, D83A, V84F] | | | | |
| t815877 | [A18D, N29T, | 36091.62 | 5306.50 | 2.97 | 0.23 |
| | V31L, D39Q, D71S, | | | | |
| | D83A] | | | | |
| t815903 | [A18D, V31L, I33N, | 43634.75 | 5037.15 | 2.87 | 0.26 |
| | D39Q, D71S, D83A] | | | | |
| t815853 | [A18D, N29T, | 43642.68 | NaN | 2.82 | NaN |
| | V31L, D39Q, D83A, | | | | |
| | V84F] | | | | |
| t815905 | [E17N, A18D, I33N, | 38172.27 | 1406.28 | 2.68 | 0.12 |
| | D39Q, D71S, D83A] | | | | |
| t815863 | [E17N, A18D, | 36094.76 | 8414.97 | 2.64 | 0.10 |
| | V31L, I33N, D71S, | | | | |
| | V84F] | | | | |
| t815871 | [A18D, N29T, I33N, | 44488.79 | 2020.74 | 2.59 | 0.60 |
| | D39Q, D71S, D83A] | | | | |
| t815837 | [E17N, A18D, | 36312.69 | 5578.28 | 2.59 | 0.08 |
| | V31L, I33N, D83A, | | | | |
| | V84F] | | | | |
| t815835 | [E17N, A18D, | 32658.87 | 5410.17 | 2.50 | 0.09 |
| | N29T, V31L, I33N, | | | | |
| | D83A] | | | | |
| t815899 | [E17N, A18D, | 41669.54 | 2020.40 | 2.47 | 0.37 |
| | V31L, D39Q, D83A, | | | | |
| | V84F] | | | | |
| t815838 | A18D, N29T, | 37370.30 | 4081.42 | 2.34 | 0.09 |
| | V31L, I33N, D83A, | | | | |
| | V84F] | | | | |
| t815901 | [E17N, A18D, | 39489.34 | 729.89 | 2.27 | 0.22 |
| | N29T, V31L, D71S, | | | | |
| | V84F] | | | | |
| t815881 | [E17N, A18D, | 32774.59 | 4057.74 | 2.22 | 0.12 |
| | N29T, V31L, D39Q, | | | | |
| | D83A] | | | | |
| t815828 | [E17N, A18D, | 40926.17 | 6005.50 | 2.18 | 0.40 |
| | D39Q, D71S, D83A, | | | | |
| | V84F] | | | | |
| t815888 | [E17N, A18D, I33N, | 36730.64 | 2676.94 | 2.13 | 0.71 |
| | D71S, D83A, V84F] | | | | |
| t815834 | [A18D, N29T, | 35009.31 | 2374.51 | 2.13 | 0.10 |
| | V31L, I33N, D71S, | | | | |
| | V84F] | | | | |
| t815904 | [A18D, I33N, D39Q, | 36221.85 | 6677.50 | 2.09 | 0.52 |
| | D71S, D83A, V84F] | | | | |
| t815827 | [E17N, A18D, | 34860.93 | 15643.87 | 1.97 | 1.23 |
| | V31L, I33N, D71S, | | | | |
| | D83A] | | | | |
| t815907 | [E17N, A18D, | 33995.00 | 6537.45 | 1.96 | 0.65 |
| | V31L, I33N, D39Q, | | | | |
| | D83A] | | | | |
| t815849 | [A18D, N29T, I33N, | 28538.88 | 5644.49 | 1.94 | 0.16 |
| | D39Q, D83A, V84F] | | | | |
| t815855 | [E17N, A18D, I33N, | 30089.72 | 147.45 | 1.91 | 0.01 |
| | D39Q, D83A, V84F] | | | | |
| t815842 | [A18D, N29T, | 38794.41 | 8972.62 | 1.87 | 0.09 |
| | V31L, D39Q, D71S, | | | | |
| | V84F] | | | | |
| t815867 | [E17N, A18D, | 43486.43 | 6654.88 | 1.81 | 0.49 |
| | V31L, D39Q, D71S, | | | | |
| | V84F] | | | | |
| t815906 | [E17N, A18D, | 28859.48 | 2431.80 | 1.80 | 0.52 |
| | V31L, I33N, D39Q, | | | | |
| | D71S] | | | | |
| t815852 | [A18D, N29T, | 32126.56 | 8527.84 | 1.78 | 0.61 |
| | V31L, I33N, D39Q, | | | | |
| | D83A] | | | | |
| t815879 | [E17N, A18D, | 35056.85 | 778.11 | 1.78 | 0.06 |
| | N29T, I33N, D71S, | | | | |
| | D83A] | | | | |
| t815896 | [E17N, A18D, I33N, | 27853.32 | 4862.01 | 1.65 | 0.10 |
| | D39Q, D71S, V84F] | | | | |
| t815895 | [A18D, N29T, | 29013.73 | 776.74 | 1.61 | 0.01 |
| | D39Q, D71S, D83A, | | | | |
| | V84F] | | | | |
| t815836 | [A18D, N29T, I33N, | 33932.07 | 2658.16 | 1.58 | 0.25 |
| | D71S, D83A, V84F] | | | | |
| t815902 | [E17N, A18D, | 34708.90 | 3892.84 | 1.58 | 0.09 |
| | V31L, I33N, D39Q, | | | | |
| | V84F] | | | | |
| t815865 | [E17N, A18D, | 27609.94 | 1441.49 | 1.56 | 0.11 |
| | N29T, 133N, D39Q, | | | | |
| | D83A] | | | | |
| t815908 | [E17N, A18D, | 29852.50 | 2287.07 | 1.51 | 0.54 |
| | N29T, D39Q, D71S, | | | | |
| | D83A] | | | | |
| t815843 | [A18D, N29T, | 35731.01 | 10611.66 | 1.43 | 0.15 |
| | V31L, I33N, D39Q, | | | | |
| | V84F] | | | | |
| t815875 | [E17N, A18D, | 30632.17 | 1861.61 | 1.40 | 0.14 |
| | N29T, D71S, D83A, | | | | |
| | V84F] | | | | |
| t815872 | [N29T, V31L, I33N, | 33086.50 | 5504.44 | 1.35 | 0.03 |
| | D39Q, D71S, D83A] | | | | |
| t815898 | [E17N, A18D, | 24271.32 | 3358.39 | 1.32 | 0.22 |
| | N29T, I33N, D83A, | | | | |
| | V84F] | | | | |
| t815897 | [E17N, A18D, | 28267.49 | 1626.04 | 1.29 | 0.25 |
| | N29T, V31L, I33N, | | | | |
| | D71S] | | | | |
| t815850 | [E17N, N29T, | 28683.03 | 2743.43 | 1.20 | 0.26 |
| | V31L, I33N, D71S, | | | | |
| | D83A] | | | | |
| t815910 | [N29T, I33N, D39Q, | 23567.96 | 6052.88 | 1.17 | 0.42 |
| | D71S, D83A, V84F] | | | | |
| t815882 | [E17N, A18D, | 26275.60 | 218.96 | 1.13 | 0.03 |
| | N29T, V31L, I33N, | | | | |
| | D39Q] | | | | |
| t815869 | [A18D, V31L, I33N, | 26312.14 | 7219.06 | 1.13 | 0.39 |
| | D39Q, D71S, V84F] | | | | |
| t815878 | [E17N, N29T, | 23511.30 | 3103.18 | 1.07 | 0.23 |
| | V31L, I33N, D83A, | | | | |
| | V84F] | | | | |
| t815858 | [E17N, V31L, I33N, | 30845.73 | 6875.73 | 1.05 | 0.17 |
| | D71S, D83A, V84F] | | | | |
| t815857 | [E17N, V31L, I33N, | 29770.65 | 6425.08 | 1.05 | 0.28 |
| | D39Q, D71S, D83A] | | | | |
| t815846 | [E17N, A18D, | 21644.98 | 15432.47 | 0.98 | 1.06 |
| | N29T, V31L, I33N, | | | | |
| | V84F] | | | | |
| t815886 | [E17N, V31L, | 22966.40 | 9020.82 | 0.94 | 0.44 |
| | D39Q, D71S, D83A, | | | | |
| | V84F] | | | | |
| t815894 | [N29T, V31L, I33N, | 19807.04 | 1913.56 | 0.90 | 0.02 |
| | D39Q, D83A, V84F] | | | | |
| t815891 | [E17N, A18D, | 16423.81 | 2292.54 | 0.83 | 0.04 |
| | N29T, I33N, D71S, | | | | |
| | V84F] | | | | |
| t815831 | [E17N, A18D, | 19842.58 | 314.09 | 0.81 | 0.10 |
| | N29T, V31L, D39Q, | | | | |
| | V84F] | | | | |
| t815892 | [E17N, N29T, | 27654.77 | NaN | 0.78 | NaN |
| | V31L, D71S, D83A, | | | | |
| | V84F] | | | | |
| t815840 | [E17N, I33N, D39Q, | 18279.26 | 1046.99 | 0.72 | 0.01 |
| | D71S, D83A, V84F] | | | | |
| t815909 | [E17N, A18D, | 16671.36 | 2033.67 | 0.69 | 0.01 |
| | N29T, I33N, D39Q, | | | | |
| | D71S] | | | | |
| t621324 | [A18D E22K T26A | 16829.38 | 2766.43 | 0.67 | 0.18 |
| control | N29S E53H H57Y | | | | |
| | Q70L G82K D83A | | | | |
| | S87K] | | | | |
| t815868 | [E17N, N29T, | 16907.68 | 1586.46 | 0.66 | 0.03 |
| | V31L, I33N, D39Q, | | | | |
| | D83A] | | | | |
| t815856 | [E17N, N29T, | 17081.44 | 2908.10 | 0.65 | 0.05 |
| | V31L, D39Q, D71S, | | | | |
| | D83A] | | | | |
| t815851 | [N29T, V31L, I33N, | 16447.30 | 295.78 | 0.53 | 0.04 |
| | D39Q, D71S, V84F] | | | | |
| t815860 | [E17N, N29T, I33N, | 16483.78 | 1949.73 | 0.53 | 0.13 |
| | D39Q, D71S, D83A] | | | | |
| t815830 | [A18D, N29T, | 15613.24 | 883.00 | 0.52 | 0.06 |
| | V31L, I33N, D39Q, | | | | |
| | D71S] | | | | |
| t815841 | [E17N, A18D, | 15061.45 | 2395.21 | 0.51 | 0.10 |
| | N29T, I33N, D39Q, | | | | |
| | V84F] | | | | |
| t815844 | [E17N, N29T, | 14346.60 | 563.91 | 0.50 | 0.06 |
| | V31L, I33N, D71S, | | | | |
| | V84F] | | | | |
| t815890 | [E17N, N29T, I33N, | 8905.77 | 11353.83 | 0.48 | 0.71 |
| | D39Q, D83A, V84F] | | | | |
| t815861 | [E17N, N29T, | 13072.13 | 566.05 | 0.45 | 0.06 |
| | V31L, D39Q, D83A, | | | | |
| | V84F] | | | | |
| t815874 | [E17N, A18D, | 12902.23 | 1626.79 | 0.45 | 0.14 |
| | N29T, D39Q, D71S, | | | | |
| | V84F] | | | | |
| t815893 | [E17N, N29T, I33N, | 10230.32 | 811.02 | 0.38 | 0.01 |
| | D71S, D83A, V84F] | | | | |
| t815829 | [E17N, V31L, I33N, | 10524.50 | 1187.27 | 0.36 | 0.03 |
| | D39Q, D71S, V84F] | | | | |
| t815832 | [E17N, N29T, | 8802.50 | 4580.88 | 0.34 | 0.20 |
| | V31L, I33N, D39Q, | | | | |
| | V84F] | | | | |
| t815839 | [E17N, A18D, | 8414.07 | 6954.17 | 0.32 | 0.31 |
| | N29T, V31L, D39Q, | | | | |
| | D71S] | | | | |
| t782404 | N/A (GFP) | 8573.22 | 1281.74 | 0.31 | 0.00 |
| control | | | | | |
| t815833 | [E17N, V31L, I33N, | 9417.30 | 9216.60 | 0.30 | 0.31 |
| | D39Q, D83A, V84F] | | | | |
| t815859 | [E17N, N29T, | 8631.14 | 112.37 | 0.24 | 0.04 |
| | V31L, I33N, D39Q, | | | | |
| | D71S] | | | | |
| t815847 | [E17N, N29T, | 6905.20 | 803.92 | 0.20 | 0.01 |
| | V31L, D39Q, D71S, | | | | |
| | V84F] | | | | |
| t815864 | [E17N, N29T, I33N, | 5576.78 | 830.47 | 0.16 | 0.03 |
| | D39Q, D71S, V84F] | | | | |

### Example 3: Identification of Additional Synthetic OAC Polypeptides that are Capable of Producing Olivetolic Acid

[0498] An additional library of synthetic OAC polypeptides was designed using a combination of: (1) statistical information derived from homologous proteins; (2) variant abundance data derived from a multiplexed assay; (3) variant stability differences predicted from structures; and (4) activity data from previous designs obtained via an in vivo activity assay. Statistical information from homologous proteins was obtained from two models both derived from a multiple sequence alignment of several thousand homologs to CsOAC: a position-specific scoring matrix, which scores amino acids at each position as either being present more often or less often than one would expect from chance; and a second-order Potts model which incorporates both position-specific information as well as interactions between positions in the multiplex sequence alignment, similarly scoring full-length sequences as either more or less likely to occur. Variant abundance data were derived from both a site-scanning library presenting all possible single mutations of CsOAC as well as a combinatorial library in which previously identified beneficial mutations were recombined together. The variant abundance was determined in a multiplexed assay wherein synthetic OAC polypeptides were expressed as genetic fusions to GFP and isolated based upon their fluorescent signal at a single-cell level. Variants that were brighter were assumed to be able to be expressed at a high level, due to some combination of increased thermal and colloidal stability. Variant stability predictions were computed using structural models of mutants of CsOAC and a scoring algorithm combining physics-based and statistically-based features of protein structures. Scores are assumed to be correlative with protein stability. Activity data from previous designs were obtained via the in vivo assays described above. Previous designs incorporated portions of the scoring systems proposed above. These data were combined and filtered across a collection of thresholds to obtain corresponding collections of point-mutations. These point-mutations were then combinatorially evaluated via a structure-guided scoring algorithm.

[0499] 900 synthetic OAC polypeptides generated via these various design strategies were assembled into a library. For expression in S. cerevisiae, nucleotide sequences were recoded, synthesized, and cloned into an integrative yeast expression vector. Each candidate OAC expression construct was transformed into a S. cerevisiae CEN.PK strain previously engineered to produce olivetol by carrying a genomically integrated olivetol synthase as in Example 1. Strain t782504, expressing CsOAC, was included in the library as a positive control. Strain t621324, expressing a CsOAC variant containing a combination of 10 point mutations relative to the CsOAC peptide sequence, was included in the library as positive control for hit ranking. Strain t782404, expressing a fluorescent protein (GFP), was included in the library as a negative control for enzyme activity. 156 hit strains were elevated to a secondary screen to verify OA and OL production (FIGS. 11A-11B and Table 8).

TABLE 8
Activity data for synthetic OAC polypeptides in S. cerevisiae
described in Example 3 and FIGS. 11A-11B.

| | | | Standard | | Standard |
|---|---|---|---|---|---|
| | Mutations relative to | | Deviation | Average | Deviation |
| | CsOAC | Average Olivetolic | Olivetolic Acid | OA/OL | OA/OL |
| Strain | (SEQ ID NO: 1) | Acid [ug/L] | [ug/L] | ratio | ratio |
| t814095 | [E64D, D71E] | 99259.28 | 11458.83 | 4.39 | 0.16 |
| t814476 | [E64D, D71E, T98K] | 106932.56 | 16461.36 | 4.15 | 0.28 |
| t814035 | [D71E] | 100324.04 | 3036.19 | 4.15 | 0.01 |
| t814456 | [S65N] | 106438.46 | 14038.86 | 4.00 | 0.51 |
| t814455 | [Y85F] | 108539.98 | 13276.90 | 3.89 | 0.17 |
| t814369 | [D71E, Y85F] | 98995.28 | 5512.66 | 3.89 | 0.14 |
| t814449 | [G80N] | 102027.20 | 4092.05 | 3.74 | 0.16 |
| CsOAC | N/A (CsOAC control) | 92056.51 | 12562.84 | 3.69 | 0.51 |
| control | | | | | |
| t814469 | [T68G] | 101196.40 | 13043.65 | 3.26 | 0.12 |
| t814121 | [I33R, E52H, Y55F, | 97896.01 | 9101.88 | 3.25 | 0.23 |
| | Q70A, I74G, D83K] | | | | |
| t814301 | [F88N] | 78443.74 | 10220.50 | 3.24 | 0.37 |
| t814277 | [T98K] | 83784.09 | 9470.12 | 3.22 | 0.43 |
| t814187 | [K101A] | 82473.77 | 9474.23 | 3.19 | 0.43 |
| t814247 | [N50F] | 85833.59 | 7842.01 | 3.19 | 0.13 |
| t814303 | [R100A] | 75141.18 | 8308.64 | 3.16 | 0.38 |
| t814046 | [D71E, G80D, R100S] | 80790.96 | 5672.39 | 3.14 | 0.11 |
| t814297 | [R100G] | 77544.52 | 7072.56 | 3.06 | 0.36 |
| t814267 | [T98E] | 93281.71 | 6950.41 | 3.06 | 0.36 |
| t814293 | [F88S] | 81206.40 | 8900.53 | 2.99 | 0.17 |
| t814475 | [V61D] | 92817.30 | 14833.56 | 2.98 | 0.60 |
| t814091 | [Y55F, G80A, D83K] | 95682.15 | 17299.12 | 2.97 | 0.29 |
| t814292 | [Y97F] | 83386.13 | 2712.81 | 2.97 | 0.24 |
| t814101 | [V66Y] | 102326.29 | 30888.79 | 2.93 | 0.30 |
| t814211 | [Q48A] | 75848.61 | 9379.21 | 2.91 | 0.23 |
| t814159 | [F95I] | 90872.11 | 6843.17 | 2.91 | 0.19 |
| t814555 | [V61S] | 91250.85 | 13810.44 | 2.87 | 0.22 |
| t814242 | [R100Q] | 79722.98 | 7831.72 | 2.86 | 0.21 |
| t814330 | [R100N] | 76845.91 | 6667.67 | 2.85 | 0.20 |
| t814556 | [R100K] | 87722.73 | 10131.48 | 2.82 | 0.23 |
| t814090 | [A18D, T26R, I33R, | 87963.02 | 3921.69 | 2.82 | 0.14 |
| | E52H, Y55F, Q70A, | | | | |
| | G80A, D83N, V84K] | | | | |
| t814181 | [G82R] | 86167.85 | 7757.83 | 2.75 | 0.12 |
| t814371 | [D13R, A18D, N29S, | 98412.72 | 5276.22 | 2.68 | 0.17 |
| | Q70L, D71Q, G80A, | | | | |
| | D83K] | | | | |
| t814086 | [T26R, I33H, E52H, | 94827.60 | 5212.14 | 2.66 | 0.18 |
| | Y55F, Q70A, D83K] | | | | |
| t814122 | [E52H, Y55F, I74G, | 82360.04 | 7505.42 | 2.64 | 0.73 |
| | G80A, D83K, Y85A] | | | | |
| t814135 | [A18D, T26R, I33R, | 86978.55 | 18258.92 | 2.53 | 0.23 |
| | E52H, Y55F, Q70A, | | | | |
| | I74G, G80A, D83N] | | | | |
| t814384 | [E22K, T26H, N29S, | 92471.22 | 12266.86 | 2.53 | 0.15 |
| | D39G, K49Q, E52H, | | | | |
| | D83N, V84K] | | | | |
| t814112 | [I33R, E52H, Y55F, | 98929.52 | 9627.43 | 2.52 | 0.38 |
| | Q70A, G80A, D83K, | | | | |
| | V84K] | | | | |
| t814486 | [A18D, T26R, E52H, | 93991.25 | 5641.02 | 2.45 | 0.24 |
| | Y55F, Q70A, G80A, | | | | |
| | D83N, V84K, Y85A] | | | | |
| t814504 | [I33H, E52H, Y55F, | 81892.82 | 4132.88 | 2.45 | 0.09 |
| | Q70A, I74G, G80A, | | | | |
| | D83K] | | | | |
| t814518 | [D45I] | 86508.97 | 9610.99 | 2.42 | 0.25 |
| t814510 | [A18D, T26R, I33H, | 82196.15 | 4928.22 | 2.31 | 0.14 |
| | E52H, Y55F, Q70A, | | | | |
| | I74G, G80A, D83N] | | | | |
| t814243 | [R100S] | 66545.44 | 12933.04 | 2.29 | 1.03 |
| t814132 | [F24M, T26R, E52H, | 82553.61 | 12048.12 | 2.26 | 0.16 |
| | Y55F, G80A, D83K] | | | | |
| t814411 | [T26R, I33H, Y55F, | 92841.09 | 15188.37 | 2.25 | 0.31 |
| | Q70A, G80A, D83K, | | | | |
| | Y85A] | | | | |
| t814049 | [A18D, T26R, I33R, | 85908.13 | 15504.24 | 2.20 | 0.25 |
| | E52H, Y55F, Q70A, | | | | |
| | G80A, D83K] | | | | |
| t814127 | [T26R, E52H, Y55F, | 86305.45 | 3855.22 | 2.18 | 0.11 |
| | Q70A, G80A, D83N, | | | | |
| | V84K, Y85A] | | | | |
| t814430 | [T26R, I33R, E52H, | 80742.44 | 11285.88 | 2.15 | 0.44 |
| | G80A, D83N, Y85A] | | | | |
| t814050 | [T26R, E52H, Y55F, | 90110.23 | 6318.84 | 2.14 | 0.19 |
| | Q70A, G80A, D83K, | | | | |
| | V84F] | | | | |
| t814416 | [A18D, T26R, I33H, | 87700.85 | 9388.18 | 2.09 | 0.11 |
| | E52H, Y55F, Q70A, | | | | |
| | G80A, D83K] | | | | |
| t814129 | [A18D, T26R, E52H, | 76833.34 | 6423.15 | 2.06 | 0.05 |
| | Y55F, Q70A, I74G, | | | | |
| | G80A, D83N, Y85A] | | | | |
| t814073 | [T26R, I33H, E52H, | 76193.56 | 1643.99 | 2.05 | 0.20 |
| | Y55F, Q70A, I74G, | | | | |
| | G80A, D83N, Y85A] | | | | |
| t814036 | [E52H, Y55F, Q70A, | 85381.80 | 2493.49 | 2.04 | 0.07 |
| | G80A, D83K, V84K, | | | | |
| | Y85A] | | | | |
| t814254 | [E22K, T26R, I33H, | 68036.82 | 4857.23 | 2.00 | 0.16 |
| | N50K, D71Q, G80A, | | | | |
| | D83E, T98Y] | | | | |
| t814506 | [T26R, I33R, E52H, | 80706.53 | 10279.55 | 1.96 | 0.15 |
| | Y55F, Q70A, G80A, | | | | |
| | D83K] | | | | |
| t814317 | [A18D, E22K, N29S, | 70516.82 | 7598.78 | 1.95 | 0.34 |
| | Q70A, G82K, D83R, | | | | |
| | S87K, F88Y] | | | | |
| t814066 | [I33H, E52H, Y55F, | 70870.95 | 6613.47 | 1.94 | 0.14 |
| | Q70A, G80A, D83K, | | | | |
| | V84K] | | | | |
| t814069 | [A18D, T26R, N29S, | 68881.87 | 2647.33 | 1.93 | 0.30 |
| | I33H, E52H, Y55F, | | | | |
| | Q70A, I74G, G80A, | | | | |
| | D83N, Y85A] | | | | |
| t814400 | [V59F] | 78649.60 | 4679.03 | 1.93 | 0.13 |
| t814161 | [A18D, E22K, T26A, | 67332.37 | 8497.08 | 1.92 | 0.13 |
| | N29S, Q70L, G82K, | | | | |
| | D83A] | | | | |
| t814118 | [T26R, I33R, E52H, | 78766.93 | 3474.85 | 1.91 | 0.17 |
| | Y55F, Q70A, I74G, | | | | |
| | G80A, D83N, V84K, | | | | |
| | Y85A] | | | | |
| t814199 | [N50W] | 71334.80 | 8348.90 | 1.90 | 0.05 |
| t814031 | [I33H, E52H, Q70A, | 72000.32 | 1054.90 | 1.89 | 0.20 |
| | G80A, D83K, Y85A] | | | | |
| t814490 | [A18D, T26R, I33H, | 76541.21 | 11297.36 | 1.88 | 0.08 |
| | E52H, Y55F, Q70A, | | | | |
| | D71Q, I74G, G80A, | | | | |
| | D83N, V84K, Y85A] | | | | |
| t814442 | [A18D, T26A, N29S, | 75008.38 | 7209.44 | 1.88 | 0.31 |
| | Q70L, G82K, D83E, | | | | |
| | S87K] | | | | |
| t814152 | [A18D, F24M, T26R, | 79395.67 | 5948.92 | 1.86 | 0.18 |
| | I33H, E52H, Y55F, | | | | |
| | Q70A, G80A, D83N] | | | | |
| t814485 | [I33H, E52H, Y55F, | 85922.63 | 5750.37 | 1.85 | 0.12 |
| | Q70A, G80V, D83K] | | | | |
| t814078 | [A18D, T26R, N29S, | 69219.21 | 2118.47 | 1.84 | 0.09 |
| | I33R, E52H, Y55F, | | | | |
| | Q70A, I74G, G80A, | | | | |
| | D83N, Y85A] | | | | |
| t814054 | [T26R, I33R, E52H, | 69535.34 | 531.41 | 1.80 | 0.09 |
| | Y55F, G80A, Y85A] | | | | |
| t814064 | [T26R, I33R, E52H, | 70010.30 | 8211.71 | 1.80 | 0.08 |
| | Q70A, G80A, D83K] | | | | |
| t814166 | [I33H, E52H, Y55F, | 76106.47 | 6106.34 | 1.80 | 0.13 |
| | Q70A, G80A, D83N, | | | | |
| | V84K, Y85A] | | | | |
| t814508 | [A18D, F24M, T26R, | 67651.17 | 7876.19 | 1.78 | 0.09 |
| | I33H, E52H, Y55F, | | | | |
| | Q70A, I74G, G80A, | | | | |
| | D83N, V84K, Y85A] | | | | |
| t814526 | [A18D, T26R, I33R, | 54304.54 | 13362.86 | 1.78 | 0.06 |
| | E52H, Y55F, Q70A, | | | | |
| | G80A, D83N, V84F] | | | | |
| t814363 | [T26R, I33R, Y55F, | 79214.22 | 5130.62 | 1.78 | 0.05 |
| | Q70A, G80A, D83K, | | | | |
| | Y85A] | | | | |
| t814355 | [T26R, I33H, E52H, | 75030.60 | 1368.09 | 1.78 | 0.23 |
| | Y55F, Q70A, G80A, | | | | |
| | D83E, Y85A] | | | | |
| t814125 | [T26R, I33H, E52H, | 73996.36 | 2073.33 | 1.77 | 0.06 |
| | Y55F, Q70A, G80A, | | | | |
| | Y85A] | | | | |
| t814477 | [A18D, T26R, I33H, | 78801.64 | 3693.25 | 1.77 | 0.17 |
| | E52H, Y55F, Q70A, | | | | |
| | G80A, D83E, Y85A] | | | | |
| t814110 | [I33H, E52H, Y55F, | 68786.64 | 6477.05 | 1.76 | 0.12 |
| | G80A, D83K, Y85A] | | | | |
| t814467 | [A18D, E22K, T26A, | 71944.63 | 6198.99 | 1.76 | 0.11 |
| | N29S, E53H, Q70L, | | | | |
| | G82K, D83A] | | | | |
| t814103 | [T26R, E52H, Y55F, | 65161.42 | 4494.72 | 1.76 | 0.22 |
| | G80A, D83K, Y85A] | | | | |
| t814483 | [V28H, I33H, E52H, | 76966.87 | 4601.42 | 1.76 | 0.14 |
| | Y55F, Q70A, G80A, | | | | |
| | D83K] | | | | |
| t814120 | [T26R, I33H, E52H, | 80770.56 | 6868.86 | 1.75 | 0.08 |
| | Y55F, G80A, D83N, | | | | |
| | Y85A] | | | | |
| t814334 | [A18D, T26R, N29S, | 58758.68 | 4476.79 | 1.75 | 0.19 |
| | I33R, E52H, Y55F, | | | | |
| | Q70A, I74G, G80A, | | | | |
| | D83N, V84K, Y85A] | | | | |
| t814388 | [A18D, E22K, N29S, | 74725.60 | 6838.14 | 1.74 | 0.04 |
| | Q70L, G82K, D83K, | | | | |
| | S87K] | | | | |
| t814140 | [A18D, T26R, E52H, | 76018.91 | 9585.13 | 1.69 | 0.16 |
| | Y55F, Q70A, G80A, | | | | |
| | D83K, Y85A] | | | | |
| t813741 | [A2G, V3Y, V46F, E60L, | 27548.07 | 25508.26 | 1.65 | 1.82 |
| | E67K, T68H, G80D, | | | | |
| | D83S, R86S, W89M, | | | | |
| | T98K, R100S, K101E] | | | | |
| t814516 | [I33H, E52H, Y55F, | 79997.35 | 8676.98 | 1.65 | 0.09 |
| | Q70A, G80A, D83K, | | | | |
| | V84F] | | | | |
| t814512 | [T26R, E52H, Y55F, | 79285.61 | 16774.42 | 1.60 | 0.09 |
| | Q70A, G80A, D83K, | | | | |
| | Y85A] | | | | |
| t814044 | [A18D, F24M, T26R, | 77077.52 | 8987.80 | 1.58 | 0.22 |
| | I33H, E52H, Y55F, | | | | |
| | Q70A, G80A, D83N, | | | | |
| | V84K, Y85A] | | | | |
| t814304 | [A18D, Q19D, F24M, | 61871.74 | 5451.10 | 1.58 | 0.03 |
| | N29S, N50K, Y55F, | | | | |
| | Q70A, I74G, G80V, | | | | |
| | D83E, V84K] | | | | |
| t814063 | [F24M, E52H, Q70A, | 68226.32 | 2516.64 | 1.58 | 0.24 |
| | G80A, D83K, Y85A] | | | | |
| t814133 | [A18D, T26R, N29S, | 72427.63 | 3842.75 | 1.57 | 0.13 |
| | I33R, E52H, Y55F, | | | | |
| | Q70A, D71Q, I74G, | | | | |
| | G80A, D83N, V84K, | | | | |
| | Y85A] | | | | |
| t814521 | [A18D, I33R, E52H, | 71320.48 | 15604.75 | 1.57 | 0.08 |
| | Y55F, Q70A, I74G, | | | | |
| | G80A, D83N, V84K, | | | | |
| | Y85A] | | | | |
| t814391 | [A18D, E22K, N29S, | 71625.07 | 8504.96 | 1.57 | 0.19 |
| | Q70L, G82K, D83Q, | | | | |
| | S87K, F88Y] | | | | |
| t814128 | [E52H, Y55F, Q70A, | 74221.09 | 4022.64 | 1.57 | 0.17 |
| | D83K, V84F, Y85A] | | | | |
| t814280 | [A18D, T26A, V28E, | 60686.44 | 3465.46 | 1.56 | 0.13 |
| | N29S, Q70A, G82K, | | | | |
| | D83A, S87K] | | | | |
| t814177 | [A18D, T26R, N29S, | 65847.20 | 5638.88 | 1.56 | 0.28 |
| | I33R, K49Q, E52H, | | | | |
| | Y55F, Q70A, I74G, | | | | |
| | G80A, D83N, V84K, | | | | |
| | Y85A] | | | | |
| t814440 | [A18D, T26A, V28E, | 70484.55 | 2175.67 | 1.55 | 0.10 |
| | N29S, Q70L, G82K, | | | | |
| | D83N, S87K] | | | | |
| t814496 | [F24M, T26R, I33R, | 68138.04 | 5631.80 | 1.55 | 0.05 |
| | E52H, Y55F, Q70A, | | | | |
| | G80A, D83N] | | | | |
| t814116 | [A18D, F24M, T26R, | 71734.50 | 3866.41 | 1.54 | 0.17 |
| | I33R, E52H, Y55F, | | | | |
| | Q70A, G80A, D83E, | | | | |
| | Y85A] | | | | |
| t814047 | [T26R, I33R, E52H, | 68260.55 | 5022.09 | 1.54 | 0.08 |
| | Y55F, Q70A, G80A, | | | | |
| | Y85A] | | | | |
| t814497 | [F24M, I33H, E52H, | 77950.71 | 6689.49 | 1.54 | 0.12 |
| | Y55F, Q70A, G80A, | | | | |
| | D83K] | | | | |
| t814575 | [A18D, T26R, I33R, | 71030.66 | 6079.55 | 1.53 | 0.10 |
| | E52H, Y55F, Q70A, | | | | |
| | G80A, D83N, V84K, | | | | |
| | Y85A] | | | | |
| t814414 | [A18D, T26R, I33R, | 68431.79 | 5346.05 | 1.52 | 0.05 |
| | E52H, Y55F, Q70A, | | | | |
| | G80A, D83K, V84K, | | | | |
| | Y85A] | | | | |
| t814488 | [A18D, E22K, N29S, | 71495.03 | 4874.13 | 1.49 | 0.12 |
| | I33R, Q70L, G82K, | | | | |
| | D83R, S87K] | | | | |
| t814148 | [A18D, T26R, I33H, | 61650.57 | 3906.47 | 1.47 | 0.13 |
| | E52H, Y55F, Q70A, | | | | |
| | G80A, D83K, V84K, | | | | |
| | Y85A] | | | | |
| t814168 | [E22K, K49Q, V61T, | 70325.66 | 5845.58 | 1.47 | 0.14 |
| | Q70A, D83Q, V84F] | | | | |
| t814229 | [A18D, T26A, V28E, | 73566.57 | 14281.63 | 1.46 | 0.29 |
| | N29S, Q70L, G82K, | | | | |
| | D83Q, S87K] | | | | |
| t814158 | [A18D, F24M, T26R, | 66339.50 | 3258.94 | 1.44 | 0.16 |
| | N29S, I33H, E52H, | | | | |
| | Y55F, Q70A, G80A, | | | | |
| | D83N, V84K, Y85A] | | | | |
| t814347 | [A18D, T26R, I33R, | 70304.17 | 12311.55 | 1.44 | 0.06 |
| | E52H, Y55F, Q70A, | | | | |
| | I74G, G80A, D83N, | | | | |
| | V84F, Y85A] | | | | |
| t814420 | [A18D, T26R, I33R, | 76252.04 | 5466.38 | 1.44 | 0.06 |
| | E52H, Y55F, Q70A, | | | | |
| | G80A, D83K, V84F, | | | | |
| | Y85A] | | | | |
| t814450 | [A18D, E22K, N29S, | 66414.74 | 5837.58 | 1.44 | 0.12 |
| | Q70L, G82K, D83G, | | | | |
| | S87K] | | | | |
| t814136 | [A18D, T26R, N29S, | 62421.27 | 5280.15 | 1.42 | 0.07 |
| | I33H, E52H, Y55F, | | | | |
| | Q70A, G80A, D83N, | | | | |
| | V84F, Y85A] | | | | |
| t814033 | [T26R, I33H, E52H, | 69559.56 | 2109.09 | 1.42 | 0.06 |
| | Y55F, Q70A, D71Q, | | | | |
| | G80A, D83N, Y85A] | | | | |
| t814222 | [A18D, T26A, N29S, | 54901.18 | 1403.25 | 1.40 | 0.07 |
| | E53H, Q70L, G82K, | | | | |
| | D83E, S87K] | | | | |
| t814203 | [A18D, F24M, T26R, | 58626.81 | 4369.84 | 1.40 | 0.13 |
| | N29S, I33H, E52H, | | | | |
| | Y55F, Q70A, I74G, | | | | |
| | G80A, D83N, V84K, | | | | |
| | Y85A] | | | | |
| t814482 | [T26R, V28H, E52H, | 66120.60 | 6045.55 | 1.40 | 0.06 |
| | Y55F, Q70A, G80A, | | | | |
| | D83K] | | | | |
| t814573 | [A18D, E22K, N29S, | 61313.57 | 7018.06 | 1.37 | 0.19 |
| | Q70L, G82K, D83N, | | | | |
| | S87K] | | | | |
| t814313 | [F24M, E52H, Y55F, | 58204.75 | 4570.64 | 1.36 | 0.08 |
| | Q70A, G80A, D83K, | | | | |
| | Y85A] | | | | |
| t814360 | [K49Q, E52H, Y55F, | 62506.07 | 4094.06 | 1.35 | 0.03 |
| | G80A, D83K, Y85A] | | | | |
| t814390 | [A18D, T26A, N29S, | 61892.12 | 9412.38 | 1.34 | 0.20 |
| | Q70L, G82K, D83A, | | | | |
| | S87K] | | | | |
| t814109 | [F24M, T26R, I33H, | 63601.88 | 7922.81 | 1.33 | 0.19 |
| | E52H, Y55F, Q70A, | | | | |
| | G80A, D83K, Y85A] | | | | |
| t814342 | [D13K, A18D, E21K, | 63541.75 | 14540.54 | 1.32 | 0.02 |
| | E22K, K25A, N29S, | | | | |
| | K38L, Y55F, V61T, | | | | |
| | Q70L, D71Q, I74G, | | | | |
| | G80A, G82K, D83A, | | | | |
| | V84K] | | | | |
| t814323 | [A18D, T26A, V28E, | 56683.38 | 1400.63 | 1.32 | 0.09 |
| | N29S, E53H, Q70L, | | | | |
| | G82K, D83E, S87K] | | | | |
| t814099 | [A18D, T26R, N29S, | 61958.05 | 9976.94 | 1.28 | 0.13 |
| | I33R, E52H, Y55F, | | | | |
| | Q70A, I74G, G80A, | | | | |
| | D83N, V84F, Y85A] | | | | |
| t814062 | [T26R, I33R, E52H, | 66136.28 | 10948.72 | 1.26 | 0.08 |
| | Y55F, Q70A, G80A, | | | | |
| | D83N, V84K, Y85A] | | | | |
| t814075 | [A18D, T26R, I33R, | 66591.97 | 7562.19 | 1.25 | 0.15 |
| | E52H, Y55F, Q70A, | | | | |
| | G80A, D83N, Y85A] | | | | |
| t814431 | [I33H, E52H, Y55F, | 61959.82 | 5090.07 | 1.25 | 0.24 |
| | Q70A, G80A, D83K, | | | | |
| | Y85A] | | | | |
| t814546 | [T26R, I33R, E52H, | 57603.45 | 6188.55 | 1.24 | 0.03 |
| | Y55F, G80A, D83N, | | | | |
| | Y85A] | | | | |
| t814228 | [A18D, E22K, N29S, | 66480.60 | 9351.15 | 1.22 | 0.09 |
| | I33R, Q70L, G82K, | | | | |
| | D83R, S87K, F88Y] | | | | |
| t814500 | [F24M, T26R, I33H, | 64503.93 | 5349.67 | 1.21 | 0.09 |
| | E52H, Y55F, Q70A, | | | | |
| | G80A, D83N, Y85A] | | | | |
| t814529 | [A18D, E22K, T26H, | 63482.82 | 7674.28 | 1.20 | 0.09 |
| | N29S, Q70L, G82K, | | | | |
| | D83R, S87K, F88Y] | | | | |
| t814417 | [I33R, E52H, Y55F, | 64711.41 | 3242.97 | 1.18 | 0.08 |
| | Q70A, G80A, D83N, | | | | |
| | V84F, Y85A] | | | | |
| t814547 | [T26R, I33H, E52H, | 68250.27 | 4314.36 | 1.18 | 0.11 |
| | Y55F, Q70A, G80A, | | | | |
| | D83K, Y85A] | | | | |
| t814252 | [A18D, T26A, N29S, | 44541.60 | 4363.76 | 1.18 | 0.25 |
| | Q70L, G82K, D83R, | | | | |
| | S87K] | | | | |
| t814119 | [T26R, K49Q, E52H, | 63142.34 | 5495.38 | 1.17 | 0.12 |
| | Y55F, Q70A, G80A, | | | | |
| | D83N, Y85A] | | | | |
| t814194 | [A18D, T26R, N29S, | 51910.53 | 10307.56 | 1.17 | 0.22 |
| | I33R, E52H, Y55F, | | | | |
| | Q70A, D71Q, I74G, | | | | |
| | G80A, G82K, D83N, | | | | |
| | V84F, Y85A] | | | | |
| t814144 | [A18D, T26R, I33H, | 64224.45 | 5491.59 | 1.16 | 0.11 |
| | E52H, Y55F, Q70A, | | | | |
| | G80A, D83K, V84F, | | | | |
| | Y85A] | | | | |
| t814256 | [A18D, T26R, I33R, | 53350.15 | 5315.87 | 1.15 | 0.07 |
| | E52H, Y55F, Q70A, | | | | |
| | D71Q, I74G, G80A, | | | | |
| | D83N, V84K, Y85A] | | | | |
| t814262 | [A18D, F24M, T26R, | 60797.71 | 8668.02 | 1.15 | 0.09 |
| | I33H, E52H, Y55F, | | | | |
| | Q70A, G80A, D83N, | | | | |
| | Y85A] | | | | |
| t814213 | [A18D, F24M, I33R, | 48284.65 | 5005.12 | 1.15 | 0.14 |
| | E52H, Y55F, Q70A, | | | | |
| | I74G, G80A, D83N, | | | | |
| | Y85A] | | | | |
| t814209 | [A18D, T26R, I33H, | 48231.27 | 2973.34 | 1.15 | 0.08 |
| | K49Q, E52H, Y55F, | | | | |
| | Q70A, D71Q, I74G, | | | | |
| | G80A, D83N, V84K, | | | | |
| | Y85A] | | | | |
| t814505 | [A18D, F24M, T26R, | 53861.71 | 5768.97 | 1.13 | 0.05 |
| | I33R, E52H, Y55F, | | | | |
| | Q70A, D71Q, I74G, | | | | |
| | G80A, D83N, V84F, | | | | |
| | Y85A] | | | | |
| t814348 | [T26R, I33R, E52H, | 64580.30 | 9556.06 | 1.08 | 0.11 |
| | Y55F, Q70A, G80A, | | | | |
| | D83K, Y85A] | | | | |
| t814551 | [A18D, T26R, I33R, | 57233.25 | 7854.62 | 1.08 | 0.08 |
| | E52H, Y55F, Q70A, | | | | |
| | D71Q, I74G, G80A, | | | | |
| | D83N, Y85A] | | | | |
| t814057 | [A18D, F24M, T26R, | 59128.02 | 8511.08 | 1.07 | 0.01 |
| | N29S, I33R, E52H, | | | | |
| | Y55F, Q70A, G80A, | | | | |
| | D83N, V84F, Y85A] | | | | |
| t814141 | [T26R, I33H, E52H, | 60932.05 | 7113.88 | 1.03 | 0.08 |
| | Y55F, Q70A, G80A, | | | | |
| | D83N, V84F, Y85A] | | | | |
| t814210 | [N29S, I33R, E52H, | 49548.21 | 4737.42 | 1.03 | 0.11 |
| | Y55F, Q70A, G80A, | | | | |
| | D83K, Y85A] | | | | |
| t814532 | [A18D, I33H, E52H, | 51117.00 | 5721.69 | 1.00 | 0.10 |
| | Y55F, Q70A, G80A, | | | | |
| | D83N, V84F, Y85A] | | | | |
| t814193 | [A18D, F24M, T26R, | 51531.08 | 2806.47 | 0.98 | 0.10 |
| | N29S, I33H, E52H, | | | | |
| | Y55F, Q70A, G80A, | | | | |
| | D83N, V84F, Y85A] | | | | |
| t814326 | [A18D, F24M, T26R, | 49506.68 | 5425.54 | 0.98 | 0.02 |
| | N29S, I33R, E52H, | | | | |
| | Y55F, Q70A, D71Q, | | | | |
| | I74G, G80A, D83N, | | | | |
| | V84K, Y85A] | | | | |
| t814225 | [T26R, I33R, K49Q, | 46671.13 | 4390.75 | 0.96 | 0.09 |
| | E52H, Y55F, Q70A, | | | | |
| | I74G, G80A, D83N, | | | | |
| | Y85A] | | | | |
| t814436 | [F24M, I33R, E52H, | 56696.61 | 12728.60 | 0.92 | 0.03 |
| | Y55F, Q70A, G80A, | | | | |
| | D83K, Y85A] | | | | |
| t814533 | [A18D, T26R, I33H, | 55150.84 | 9098.06 | 0.84 | 0.07 |
| | K49Q, E52H, Y55F, | | | | |
| | Q70A, G80A, D83N, | | | | |
| | Y85A] | | | | |
| t814201 | [A18D, I33H, K49Q, | 35649.52 | 2325.58 | 0.84 | 0.10 |
| | E52H, Y55F, Q70A, | | | | |
| | G80A, D83N, Y85A] | | | | |
| t814208 | [A18D, T26A, V28E, | 44146.79 | 8318.58 | 0.84 | 0.17 |
| | N29S, E53H, Q70L, | | | | |
| | G80A, G82K, D83A, | | | | |
| | S87K] | | | | |
| t621324 | [A18D E22K T26A N29S | 28824.56 | 4324.76 | 0.82 | 0.10 |
| (control) | E53H H57Y Q70L G82K | | | | |
| | D83A S87K] | | | | |
| t814537 | [A18D, F24M, T26R, | 45472.46 | 9370.79 | 0.68 | 0.10 |
| | N29S, I33H, K49Q, | | | | |
| | E52H, Y55F, Q70A, | | | | |
| | G80A, D83N, V84F, | | | | |
| | Y85A] | | | | |
| t814296 | [A18D, T26R, N29S, | 41020.94 | 2545.16 | 0.64 | 0.02 |
| | I33H, K49Q, E52H, | | | | |
| | Y55F, Q70A, G80A, | | | | |
| | D83N, V84F, Y85A] | | | | |
| t782404 | N/A (GFP control) | 28760.66 | 4283.59 | 0.49 | 0.07 |
| (control) | | | | | |

### Example 4: Identification of Additional Synthetic OAC Polypeptides that are Capable of Producing Olivetolic Acid

[0500] A collection of CsOAC mutation designs from Examples 1-3 was assessed for activity. These designs spanned a number of positions and included many combinations of mutations. Following screening which evaluated olivetolic acid (OA) and olivetol (OL) production in an in vivo context, data were filtered based upon reliability and a predictive model regressed to predict OA and OL production given a protein sequence. Using this model, a set of template sequences which had been identified in Examples 1-3 as lead candidates was subjected to incorporation of additional mutations as assessed by the model. Designs were made to achieve some combination of predicted OA production increase and/or predicted OL production decrease.

[0501] 928 synthetic OAC polypeptides generated via these various design strategies were assembled into a library. For expression in S. cerevisiae, nucleotide sequences were recoded, synthesized, and cloned into an integrative yeast expression vector. Each candidate OAC expression construct was transformed into a S. cerevisiae CEN.PK strain previously engineered to produce olivetol by carrying a genomically integrated olivetol synthase as in Example 1. Strain t815900, expressing a CsOAC variant containing a combination of 6 point mutations relative to the CsOAC peptide sequence, was included in the library as positive control for hit ranking. Strain t782404, expressing a fluorescent protein (GFP), was included in the library as a negative control for enzyme activity. Strain t782504, expressing wild-type CsOAC, was also included as a control.

[0502] An assay for measuring production of olivetolic acid was conducted as follows: each thawed glycerol stock of OAC transformants was stamped into a well of YPD+4% dextrose media. Samples were incubated at 30° C. in a shaking incubator for 2 days. A portion of each of the resulting cultures was stamped into a well of YEP+2% raffinose+2% galactose+1 mM hexanoate (C6). Samples were incubated at 30° C. in a shaking incubator for 4 days. Additional spike-ins of 1 mM hexanoate and 2% galactose were added at 24 and 48 hours for a total of 3 mM hexanoate and 6% galactose feed. A portion of each of the resulting production cultures was stamped into a well of PBS. Optical measurements were taken on a plate reader, with absorbance measured at 600 nm and fluorescence at 528 nm with 485 nm excitation. A portion of each of the production cultures was stamped into a well of 100% methanol in half-height deepwell plates. Plates were heat sealed and frozen at −80° C. for two hours. Samples were then thawed and spun down. A portion of the supernatant was stamped into half-area 96 well plates. Olivetolic acid and olivetol production in the samples were quantified via LC-MS.

[0503] 204 library strains were elevated to a secondary screen to verify OA and OL production. The secondary screen was performed as described above with the exception that additional biological replicates were included per strain. All strains were screened in quadruplicate (FIGS. 12A-12D and Tables 9A-9B).

[0504] Strains were designated as hits from the secondary screen if they produced a mean Olivetolic Acid titer equal to or greater than 95% of the t815900 positive control. Since minimization of Olivetol production was an explicit design strategy for this library, the ratio of OA to OL (OA/OL) was also examined. Strains were also designated as hits, using OA/OL as a key performance indicator, if they produced a mean OA/OL equal to or greater than 95% of the t815900 positive control. Several strains met both of these criteria, including: t876782, t877510, t877258, t815900, t877645, t877718, t877702, t877534, t876870, t877712, t877449, t877187, t877644, t876749, t876938, t877570, t877598, t877444, t877304, t877667, t877616, t877620, t876806, and t877290. Without wishing to be bound by any theory, the set of mutations harbored by the OAC candidates in this group may impact the apparent cyclase activity of the enzyme by enhancing the enzyme's thermal and colloidal stability and/or positively impact its kinetics against the tetraketide-CoA substrate.

[0505] Based on the data, additional strains of interest include: t877091, t876768, t876909, t877536, t877477, t877264, t877554, t876985, t876764, and t877431.

TABLE 9A
Activity data for synthetic OAC polypeptides in S. cerevisiae described in
Example 4 and FIGs. 12A-12B.

| | Mutations | | | | | | |
|---|---|---|---|---|---|---|---|
| | relative to | Olivetolic | Olivetolic | | | | |
| | CsOAC | Acid | Acid | Olivetol | Olivetol | | |
| | (SEQ ID | (ug/L) | (ug/L) | (ug/L) | (ug/L) | OA/OL | OA/OL |
| Strains | NO: 1) | mean | std | mean | std | mean | std |
| t877598 | E17N | 67868.27 | 21691.20 | 21305.15 | 6434.17 | 3.19 | 3.37 |
| | A18D | | | | | | |
| | E22K | | | | | | |
| | V31L | | | | | | |
| | I33N | | | | | | |
| | D71E | | | | | | |
| | V84F | | | | | | |
| t877570 | E17N | 63817.18 | 12078.01 | 21521.78 | 1734.48 | 2.97 | 6.96 |
| | V31L | | | | | | |
| | I33N | | | | | | |
| | S65N | | | | | | |
| | D71S | | | | | | |
| | V84K | | | | | | |
| t877091 | E17N | 50551.07 | 4492.37 | 17251.51 | 1783.09 | 2.93 | 2.52 |
| | V31L | | | | | | |
| | I33N | | | | | | |
| | D71S | | | | | | |
| | V84K | | | | | | |
| | T98K | | | | | | |
| t876768 | E17N | 51029.88 | 2242.17 | 17496.33 | 2480.65 | 2.92 | 0.90 |
| | V31L | | | | | | |
| | D39G | | | | | | |
| | D71S | | | | | | |
| | D83A | | | | | | |
| | V84K | | | | | | |
| t876938 | V84K | 67174.40 | 4646.90 | 24006.48 | 2630.23 | 2.80 | 1.77 |
| | T26R | | | | | | |
| | D39G | | | | | | |
| | D13R | | | | | | |
| | T98K | | | | | | |
| | S65N | | | | | | |
| t876909 | E17N | 33840.19 | 4098.31 | 12254.20 | 3408.22 | 2.76 | 1.20 |
| | A18D | | | | | | |
| | T26R | | | | | | |
| | V31L | | | | | | |
| | D71S | | | | | | |
| | D83A | | | | | | |
| | V84K | | | | | | |
| t877536 | E17N | 54680.05 | 3491.01 | 19992.98 | 1763.47 | 2.73 | 1.98 |
| | A18D | | | | | | |
| | V31L | | | | | | |
| | I33N | | | | | | |
| | D71S | | | | | | |
| | V84K | | | | | | |
| | T98K | | | | | | |
| t876749 | E17N | 64440.98 | 5327.62 | 23578.38 | 1077.22 | 2.73 | 4.95 |
| | A18D | | | | | | |
| | T26R | | | | | | |
| | V31L | | | | | | |
| | I33N | | | | | | |
| | D71S | | | | | | |
| | V84K | | | | | | |
| t877477 | A18D | 54780.30 | 1226.33 | 20699.62 | 1728.08 | 2.65 | 0.71 |
| | T26R | | | | | | |
| | E52H | | | | | | |
| | Y55F | | | | | | |
| | Q70A | | | | | | |
| | G80A | | | | | | |
| | D83N | | | | | | |
| | V84K | | | | | | |
| | Y85F | | | | | | |
| | F88N | | | | | | |
| t877264 | V84K | 57075.58 | 3857.78 | 21848.34 | 2343.84 | 2.61 | 1.65 |
| | T26R | | | | | | |
| | D39G | | | | | | |
| | D83E | | | | | | |
| | D13R | | | | | | |
| | T98K | | | | | | |
| t877554 | E17N | 50002.90 | 2280.08 | 19180.35 | 985.50 | 2.61 | 2.31 |
| | A18D | | | | | | |
| | V31L | | | | | | |
| | I33N | | | | | | |
| | S65N | | | | | | |
| | D71S | | | | | | |
| | V84K | | | | | | |
| t876985 | E17N | 49808.11 | 1879.77 | 19379.58 | 3707.24 | 2.57 | 0.51 |
| | V31L | | | | | | |
| | I33N | | | | | | |
| | D71S | | | | | | |
| | G82R | | | | | | |
| | V84F | | | | | | |
| t877362 | E17N | 55978.26 | 5879.41 | 21883.71 | 2598.33 | 2.56 | 2.26 |
| | A18D | | | | | | |
| | V31L | | | | | | |
| | I33N | | | | | | |
| | V66Y | | | | | | |
| | D71S | | | | | | |
| | V84F | | | | | | |
| t876764 | D13R | 50627.72 | 2274.69 | 20232.64 | 1467.87 | 2.50 | 1.55 |
| | E17N | | | | | | |
| | A18D | | | | | | |
| | V31L | | | | | | |
| | D71S | | | | | | |
| | D83A | | | | | | |
| | V84K | | | | | | |
| t877407 | A18D | 55706.52 | 1736.04 | 22286.50 | 1497.50 | 2.50 | 1.16 |
| | E22K | | | | | | |
| | T26R | | | | | | |
| | I33R | | | | | | |
| | E52H | | | | | | |
| | Y55F | | | | | | |
| | V66Y | | | | | | |
| | Q70A | | | | | | |
| | G80A | | | | | | |
| | D83N | | | | | | |
| | V84K | | | | | | |
| t877429 | E17N | 56547.64 | 1990.83 | 22639.43 | 801.14 | 2.50 | 2.49 |
| | A18D | | | | | | |
| | V31L | | | | | | |
| | I33N | | | | | | |
| | D71S | | | | | | |
| | V84K | | | | | | |
| t877431 | E17N | 54719.34 | 3649.82 | 21964.68 | 2504.58 | 2.49 | 1.46 |
| | A18D | | | | | | |
| | V31L | | | | | | |
| | I33N | | | | | | |
| | D71E | | | | | | |
| | V84F | | | | | | |
| t877109 | E17N | 32989.36 | 2692.01 | 13272.99 | 1374.32 | 2.49 | 1.96 |
| | T26R | | | | | | |
| | V31L | | | | | | |
| | D71S | | | | | | |
| | D83A | | | | | | |
| | V84K | | | | | | |
| t876982 | T26R | 49937.92 | 2166.38 | 20302.76 | 3713.45 | 2.46 | 0.58 |
| | D39G | | | | | | |
| | D83E | | | | | | |
| | E64D | | | | | | |
| | T98K | | | | | | |
| | S65N | | | | | | |
| t877136 | E17N | 53887.86 | 2665.34 | 21946.08 | 1221.45 | 2.46 | 2.18 |
| | A18D | | | | | | |
| | V31L | | | | | | |
| | D39G | | | | | | |
| | D71S | | | | | | |
| | D83A | | | | | | |
| | V84K | | | | | | |
| t877723 | E17N | 47011.33 | 11004.06 | 19283.83 | 6554.43 | 2.44 | 1.68 |
| | A18D | | | | | | |
| | V31L | | | | | | |
| | I33N | | | | | | |
| | D71S | | | | | | |
| | G82R | | | | | | |
| | V84F | | | | | | |
| t877187 | A18D | 59011.05 | 4813.31 | 24309.28 | 377.29 | 2.43 | 12.76 |
| | T26R | | | | | | |
| | I33R | | | | | | |
| | E52H | | | | | | |
| | Y55F | | | | | | |
| | V66Y | | | | | | |
| | Q70A | | | | | | |
| | G80A | | | | | | |
| | D83N | | | | | | |
| | V84K | | | | | | |
| | Y85F | | | | | | |
| t877011 | E17N | 48856.93 | 4810.13 | 20292.70 | 1075.39 | 2.41 | 4.47 |
| | A18D | | | | | | |
| | V31L | | | | | | |
| | I33N | | | | | | |
| | D71S | | | | | | |
| | I74G | | | | | | |
| | V84K | | | | | | |
| t877449 | E17N | 59697.91 | 1646.25 | 24855.90 | 1294.87 | 2.40 | 1.27 |
| | V31L | | | | | | |
| | I33N | | | | | | |
| | D71S | | | | | | |
| | V84K | | | | | | |
| | Y85F | | | | | | |
| t877712 | E17N | 60438.98 | 6217.18 | 25290.87 | 3570.75 | 2.39 | 1.74 |
| | A18D | | | | | | |
| | V31L | | | | | | |
| | D71S | | | | | | |
| | I74G | | | | | | |
| | D83E | | | | | | |
| | V84F | | | | | | |
| t877501 | D39G | 56288.48 | 3133.12 | 23588.23 | 1656.88 | 2.39 | 1.89 |
| | D83E | | | | | | |
| | D13R | | | | | | |
| | E64D | | | | | | |
| | T98K | | | | | | |
| | S65N | | | | | | |
| t876853 | E17N | 51192.93 | 6578.52 | 21555.28 | 2239.36 | 2.37 | 2.94 |
| | A18D | | | | | | |
| | V31L | | | | | | |
| | S65N | | | | | | |
| | D71S | | | | | | |
| | D83A | | | | | | |
| | V84K | | | | | | |
| t877644 | E17N | 58178.95 | 8656.44 | 24506.98 | 4230.45 | 2.37 | 2.05 |
| | A18D | | | | | | |
| | V31L | | | | | | |
| | I33N | | | | | | |
| | D71S | | | | | | |
| | D83K | | | | | | |
| | V84K | | | | | | |
| t877056 | T26R | 49443.43 | 2753.79 | 20946.27 | 1166.74 | 2.36 | 2.36 |
| | D39G | | | | | | |
| | D83E | | | | | | |
| | D13R | | | | | | |
| | T98K | | | | | | |
| | S65N | | | | | | |
| t877014 | E17N | 51670.08 | 3751.55 | 21890.11 | 899.77 | 2.36 | 4.17 |
| | A18D | | | | | | |
| | E22K | | | | | | |
| | V31L | | | | | | |
| | D71E | | | | | | |
| | D83A | | | | | | |
| | V84F | | | | | | |
| t877228 | D13R | 56782.44 | 1036.99 | 24080.67 | 708.77 | 2.36 | 1.46 |
| | A18D | | | | | | |
| | N29S | | | | | | |
| | Q70L | | | | | | |
| | D71Q | | | | | | |
| | G80A | | | | | | |
| | D83E | | | | | | |
| | T98K | | | | | | |
| t876933 | V84K | 50834.86 | 3688.86 | 21721.90 | 486.44 | 2.34 | 7.58 |
| | T26R | | | | | | |
| | D39G | | | | | | |
| | D13R | | | | | | |
| | E64D | | | | | | |
| | S65N | | | | | | |
| t876870 | E17N | 64937.02 | 3842.99 | 27812.42 | 1786.49 | 2.33 | 2.15 |
| | A18D | | | | | | |
| | V31L | | | | | | |
| | I33N | | | | | | |
| | D71S | | | | | | |
| | D83E | | | | | | |
| | V84K | | | | | | |
| t877158 | V84K | 50511.64 | 7121.08 | 21832.81 | 1444.18 | 2.31 | 4.93 |
| | T26R | | | | | | |
| | D83E | | | | | | |
| | D13R | | | | | | |
| | E64D | | | | | | |
| | T98K | | | | | | |
| t877223 | E22K | 54773.70 | 4040.06 | 23764.25 | 1240.33 | 2.30 | 3.26 |
| | T26R | | | | | | |
| | I33H | | | | | | |
| | Y55F | | | | | | |
| | Q70A | | | | | | |
| | D71E | | | | | | |
| | G80A | | | | | | |
| | D83K | | | | | | |
| t877441 | D13R | 52694.50 | 4034.20 | 22896.71 | 2283.07 | 2.30 | 1.77 |
| | A18D | | | | | | |
| | N29S | | | | | | |
| | Q70L | | | | | | |
| | D71Q | | | | | | |
| | I74G | | | | | | |
| | G80A | | | | | | |
| | D83K | | | | | | |
| | T98K | | | | | | |
| t877227 | A18D | 57436.56 | 5876.45 | 25150.13 | 4402.90 | 2.28 | 1.33 |
| | T26R | | | | | | |
| | I33R | | | | | | |
| | E52H | | | | | | |
| | Y55F | | | | | | |
| | Q70A | | | | | | |
| | D71E | | | | | | |
| | G80A | | | | | | |
| | D83N | | | | | | |
| | V84K | | | | | | |
| t877534 | V84K | 60486.62 | 4718.43 | 26604.38 | 1613.50 | 2.27 | 2.92 |
| | T26R | | | | | | |
| | D39G | | | | | | |
| | D83E | | | | | | |
| | T98K | | | | | | |
| | S65N | | | | | | |
| t876945 | E17N | 49344.29 | 3954.50 | 21965.10 | 2541.79 | 2.25 | 1.56 |
| | V31L | | | | | | |
| | I33N | | | | | | |
| | D71S | | | | | | |
| | V84K | | | | | | |
| | T98Y | | | | | | |
| t876987 | E17N | 52352.34 | 6215.69 | 23431.23 | 1821.68 | 2.23 | 3.41 |
| | V31L | | | | | | |
| | D71S | | | | | | |
| | D83A | | | | | | |
| | V84F | | | | | | |
| | T98Y | | | | | | |
| t877645 | E17N | 60952.30 | 8731.29 | 27313.27 | 1880.08 | 2.23 | 4.64 |
| | E22K | | | | | | |
| | V31L | | | | | | |
| | I33N | | | | | | |
| | D71E | | | | | | |
| | V84F | | | | | | |
| t877404 | E17N | 54149.04 | 1829.47 | 24395.83 | 1120.53 | 2.22 | 1.63 |
| | A18D | | | | | | |
| | V31L | | | | | | |
| | D71S | | | | | | |
| | I74G | | | | | | |
| | D83A | | | | | | |
| | V84K | | | | | | |
| t877718 | E17N | 57706.74 | 1367.21 | 26027.09 | 1785.37 | 2.22 | 0.77 |
| | A18D | | | | | | |
| | V31L | | | | | | |
| | D71E | | | | | | |
| | D83A | | | | | | |
| | V84F | | | | | | |
| t877698 | E17N | 55949.94 | 11367.02 | 25333.42 | 5637.25 | 2.21 | 2.02 |
| | A18D | | | | | | |
| | V31L | | | | | | |
| | D71S | | | | | | |
| | D83E | | | | | | |
| | V84F | | | | | | |
| | T98Y | | | | | | |
| t876959 | A18D | 53915.45 | 5563.11 | 24414.71 | 2336.65 | 2.21 | 2.38 |
| | T26R | | | | | | |
| | D39G | | | | | | |
| | E52H | | | | | | |
| | Y55F | | | | | | |
| | Q70A | | | | | | |
| | G80A | | | | | | |
| | D83N | | | | | | |
| | V84K | | | | | | |
| | T98K | | | | | | |
| t877021 | E17N | 52143.99 | 2881.57 | 23657.40 | 908.72 | 2.20 | 3.17 |
| | V31L | | | | | | |
| | I33N | | | | | | |
| | V66Y | | | | | | |
| | D71S | | | | | | |
| | V84F | | | | | | |
| t877702 | E17N | 60323.07 | 5054.18 | 27415.81 | 5956.57 | 2.20 | 0.85 |
| | V31L | | | | | | |
| | D71S | | | | | | |
| | D83E | | | | | | |
| | V84F | | | | | | |
| | T98Y | | | | | | |
| t876990 | V84K | 49616.28 | 1548.70 | 22698.29 | 1513.65 | 2.19 | 1.02 |
| | D39G | | | | | | |
| | D13R | | | | | | |
| | E64D | | | | | | |
| | T98K | | | | | | |
| | S65N | | | | | | |
| t876772 | E17N | 44451.09 | 4539.77 | 20565.64 | 1090.33 | 2.16 | 4.16 |
| | A18D | | | | | | |
| | V31L | | | | | | |
| | I33N | | | | | | |
| | V66Y | | | | | | |
| | D71E | | | | | | |
| | V84F | | | | | | |
| t877248 | E17N | 31807.81 | 15843.50 | 14750.48 | 17077.18 | 2.16 | 0.93 |
| | A18D | | | | | | |
| | V31L | | | | | | |
| | I33N | | | | | | |
| | D71S | | | | | | |
| | I74G | | | | | | |
| | D83K | | | | | | |
| | V84F | | | | | | |
| t877510 | E17N | 59381.25 | 4475.59 | 27720.90 | 1434.25 | 2.14 | 3.12 |
| | T26R | | | | | | |
| | V31L | | | | | | |
| | D71S | | | | | | |
| | D83E | | | | | | |
| | V84F | | | | | | |
| t877258 | E17N | 60136.68 | 7447.61 | 28147.27 | 4203.09 | 2.14 | 1.77 |
| | V31L | | | | | | |
| | I33N | | | | | | |
| | E64D | | | | | | |
| | D71S | | | | | | |
| | V84F | | | | | | |
| t877088 | E17N | 49961.36 | 3968.73 | 23428.45 | 1241.19 | 2.13 | 3.20 |
| | V31L | | | | | | |
| | I33N | | | | | | |
| | D71S | | | | | | |
| | D83K | | | | | | |
| | V84K | | | | | | |
| t877516 | V84K | 52307.39 | 2218.39 | 24548.03 | 1514.85 | 2.13 | 1.46 |
| | D39G | | | | | | |
| | D83E | | | | | | |
| | D13R | | | | | | |
| | T98K | | | | | | |
| | S65N | | | | | | |
| t877306 | A18D | 45652.55 | 3641.24 | 21442.37 | 2263.41 | 2.13 | 1.61 |
| | T26R | | | | | | |
| | I33R | | | | | | |
| | E52H | | | | | | |
| | Y55F | | | | | | |
| | S65N | | | | | | |
| | Q70A | | | | | | |
| | G80A | | | | | | |
| | D83E | | | | | | |
| | V84K | | | | | | |
| t877188 | A18D | 51048.31 | 3689.03 | 24130.48 | 1483.64 | 2.12 | 2.49 |
| | T26R | | | | | | |
| | I33R | | | | | | |
| | E52H | | | | | | |
| | Y55F | | | | | | |
| | V66Y | | | | | | |
| | Q70A | | | | | | |
| | D71E | | | | | | |
| | G80A | | | | | | |
| | D83N | | | | | | |
| | V84K | | | | | | |
| t876766 | E17N | 48231.25 | 3648.00 | 22912.68 | 2213.71 | 2.11 | 1.65 |
| | A18D | | | | | | |
| | V31L | | | | | | |
| | I33N | | | | | | |
| | D39G | | | | | | |
| | D71S | | | | | | |
| | V84K | | | | | | |
| t877629 | E17N | 50566.55 | 2789.66 | 24080.49 | 1476.78 | 2.10 | 1.89 |
| | A18D | | | | | | |
| | V31L | | | | | | |
| | D71S | | | | | | |
| | D83A | | | | | | |
| | V84K | | | | | | |
| | T98Y | | | | | | |
| t876865 | V84K | 45363.52 | 3151.94 | 21623.87 | 525.66 | 2.10 | 6.00 |
| | T26R | | | | | | |
| | D39G | | | | | | |
| | D83E | | | | | | |
| | E64D | | | | | | |
| | S65N | | | | | | |
| t876782 | A18D | 64809.00 | 4704.41 | 30912.59 | 1905.96 | 2.10 | 2.47 |
| | T26R | | | | | | |
| | I33R | | | | | | |
| | D39G | | | | | | |
| | E52H | | | | | | |
| | Y55F | | | | | | |
| | E64D | | | | | | |
| | Q70A | | | | | | |
| | G80A | | | | | | |
| | D83N | | | | | | |
| | V84K | | | | | | |
| t877108 | A18D | 44105.85 | 5897.00 | 21066.34 | 1458.25 | 2.09 | 4.04 |
| | T26R | | | | | | |
| | E52H | | | | | | |
| | Y55F | | | | | | |
| | E64D | | | | | | |
| | Q70A | | | | | | |
| | I74G | | | | | | |
| | G80A | | | | | | |
| | D83N | | | | | | |
| | V84K | | | | | | |
| t877164 | D13R | 52444.53 | 1022.42 | 25060.05 | 1527.90 | 2.09 | 0.67 |
| | A18D | | | | | | |
| | N29S | | | | | | |
| | E64D | | | | | | |
| | Q70L | | | | | | |
| | D71Q | | | | | | |
| | G80A | | | | | | |
| | D83E | | | | | | |
| t877256 | T26R | 46754.65 | 6054.46 | 22368.15 | 1888.78 | 2.09 | 3.21 |
| | I33H | | | | | | |
| | Y55F | | | | | | |
| | Q70A | | | | | | |
| | I74G | | | | | | |
| | G80A | | | | | | |
| | D83K | | | | | | |
| | Y85A | | | | | | |
| t877596 | D13R | 56239.07 | 1947.27 | 26982.19 | 9631.60 | 2.08 | 0.20 |
| | A18D | | | | | | |
| | E22K | | | | | | |
| | N29S | | | | | | |
| | Q70L | | | | | | |
| | D71Q | | | | | | |
| | G80A | | | | | | |
| | D83K | | | | | | |
| t877249 | E17N | 44060.21 | 27194.35 | 21150.39 | 11587.99 | 2.08 | 2.35 |
| | A18D | | | | | | |
| | V31L | | | | | | |
| | D71S | | | | | | |
| | D83A | | | | | | |
| | V84K | | | | | | |
| | Y85F | | | | | | |
| t877439 | D13R | 52912.00 | 3008.81 | 25417.38 | 1169.27 | 2.08 | 2.57 |
| | A18D | | | | | | |
| | N29S | | | | | | |
| | E64D | | | | | | |
| | Q70L | | | | | | |
| | D71Q | | | | | | |
| | G80A | | | | | | |
| | D83K | | | | | | |
| t815900 | E17N | 60692.00 | 12202.43 | 29189.54 | 5746.55 | 2.08 | 2.12 |
| | A18D | | | | | | |
| | V31L | | | | | | |
| | D71S | | | | | | |
| | D83A | | | | | | |
| | V84F | | | | | | |
| t877444 | E17N | 59293.89 | 4550.29 | 28537.59 | 775.95 | 2.08 | 5.86 |
| | A18D | | | | | | |
| | V31L | | | | | | |
| | I33N | | | | | | |
| | D71S | | | | | | |
| | G80A | | | | | | |
| | V84F | | | | | | |
| t877064 | E17N | 46022.26 | 4521.93 | 22155.20 | 2136.18 | 2.08 | 2.12 |
| | A18D | | | | | | |
| | V31L | | | | | | |
| | D71S | | | | | | |
| | D83K | | | | | | |
| | V84F | | | | | | |
| t877229 | V84K | 51766.53 | 581.34 | 25024.06 | 2763.81 | 2.07 | 0.21 |
| | T26R | | | | | | |
| | D39G | | | | | | |
| | D83E | | | | | | |
| | D13R | | | | | | |
| | S65N | | | | | | |
| t876807 | E17N | 54416.78 | 3410.98 | 26387.58 | 1522.51 | 2.06 | 2.24 |
| | V31L | | | | | | |
| | I33N | | | | | | |
| | D39G | | | | | | |
| | D71S | | | | | | |
| | V84K | | | | | | |
| t877304 | E17N | 58019.99 | 6004.18 | 28200.61 | 1010.49 | 2.06 | 5.94 |
| | V31L | | | | | | |
| | I33N | | | | | | |
| | V66Y | | | | | | |
| | D71E | | | | | | |
| | V84F | | | | | | |
| t877320 | D13R | 55475.12 | 5368.94 | 27093.32 | 4082.04 | 2.05 | 1.32 |
| | A18D | | | | | | |
| | T26R | | | | | | |
| | D39G | | | | | | |
| | E52H | | | | | | |
| | Y55F | | | | | | |
| | Q70A | | | | | | |
| | G80A | | | | | | |
| | D83N | | | | | | |
| | V84K | | | | | | |
| t877667 | E17N | 59293.88 | 2274.62 | 28993.64 | 742.66 | 2.05 | 3.06 |
| | V31L | | | | | | |
| | I33N | | | | | | |
| | D71E | | | | | | |
| | G82R | | | | | | |
| | V84F | | | | | | |
| t877625 | E17N | 50975.71 | 3509.66 | 24954.44 | 2374.73 | 2.04 | 1.48 |
| | A18D | | | | | | |
| | T26R | | | | | | |
| | V31L | | | | | | |
| | D71S | | | | | | |
| | D83E | | | | | | |
| | V84F | | | | | | |
| t877354 | E17N | 55675.94 | 6879.13 | 27318.84 | 5363.49 | 2.04 | 1.28 |
| | V31L | | | | | | |
| | I33N | | | | | | |
| | D71S | | | | | | |
| | D83K | | | | | | |
| | V84F | | | | | | |
| | T98Y | | | | | | |
| t877544 | V84K | 51936.13 | 15630.75 | 25563.27 | 1783.85 | 2.03 | 8.76 |
| | D39G | | | | | | |
| | D83E | | | | | | |
| | D13R | | | | | | |
| | E64D | | | | | | |
| | T98K | | | | | | |
| t877616 | T26R | 59339.87 | 2627.33 | 29475.12 | 961.12 | 2.01 | 2.73 |
| | I33H | | | | | | |
| | Y55F | | | | | | |
| | Q70A | | | | | | |
| | G80A | | | | | | |
| | D83K | | | | | | |
| | V84K | | | | | | |
| | F88N | | | | | | |
| t877185 | D13R | 56431.78 | 1953.46 | 28050.45 | 6496.14 | 2.01 | 0.30 |
| | E17N | | | | | | |
| | V31L | | | | | | |
| | D71S | | | | | | |
| | D83A | | | | | | |
| | V84K | | | | | | |
| t877620 | A18D | 58565.43 | 6339.82 | 29145.28 | 1437.66 | 2.01 | 4.41 |
| | E22K | | | | | | |
| | T26R | | | | | | |
| | E52H | | | | | | |
| | Y55F | | | | | | |
| | Q70A | | | | | | |
| | D71E | | | | | | |
| | G80A | | | | | | |
| | D83N | | | | | | |
| | V84K | | | | | | |
| t877709 | E17N | 56976.00 | 6382.90 | 28534.37 | 9507.54 | 2.00 | 0.67 |
| | T26R | | | | | | |
| | V31L | | | | | | |
| | I33N | | | | | | |
| | E64D | | | | | | |
| | D71S | | | | | | |
| | V84F | | | | | | |
| t877073 | V84K | 50256.88 | 4643.33 | 25232.83 | 5471.39 | 1.99 | 0.85 |
| | T26R | | | | | | |
| | D39G | | | | | | |
| | D13R | | | | | | |
| | E64D | | | | | | |
| | T98K | | | | | | |
| t861745 | D39Q | 53231.45 | 4132.82 | 26791.25 | 2049.20 | 1.99 | 2.02 |
| | F95M | | | | | | |
| t876837 | T26R | 53844.56 | 2316.81 | 27183.17 | 3782.35 | 1.98 | 0.61 |
| | I33H | | | | | | |
| | Y55F | | | | | | |
| | Q70A | | | | | | |
| | G80A | | | | | | |
| | D83E | | | | | | |
| | T98K | | | | | | |
| t876806 | D13R | 65340.51 | 2791.81 | 33036.07 | 1511.88 | 1.98 | 1.85 |
| | A18D | | | | | | |
| | T26R | | | | | | |
| | E52H | | | | | | |
| | Y55F | | | | | | |
| | Q70A | | | | | | |
| | G80A | | | | | | |
| | D83N | | | | | | |
| | V84K | | | | | | |
| | Y85F | | | | | | |
| t876826 | A18D | 48035.13 | 261.40 | 24298.01 | 2308.16 | 1.98 | 0.11 |
| | T26R | | | | | | |
| | D39G | | | | | | |
| | E52H | | | | | | |
| | Y55F | | | | | | |
| | Q70A | | | | | | |
| | I74G | | | | | | |
| | G80A | | | | | | |
| | D83N | | | | | | |
| | V84K | | | | | | |
| t877087 | V84K | 43514.87 | 1691.57 | 22013.71 | 1077.34 | 1.98 | 1.57 |
| | D39G | | | | | | |
| | D83E | | | | | | |
| | E64D | | | | | | |
| | T98K | | | | | | |
| | S65N | | | | | | |
| t877290 | V84K | 58038.07 | 4194.21 | 29367.92 | 1203.75 | 1.98 | 3.48 |
| | T26R | | | | | | |
| | D83E | | | | | | |
| | D13R | | | | | | |
| | T98K | | | | | | |
| | S65N | | | | | | |
| t877100 | T26R | 52206.88 | 4172.80 | 26599.39 | 2164.38 | 1.96 | 1.93 |
| | I33N | | | | | | |
| | Y55F | | | | | | |
| | Q70A | | | | | | |
| | D71S | | | | | | |
| | G80A | | | | | | |
| | D83K | | | | | | |
| t861743 | I33R | 51788.45 | 4620.19 | 26394.32 | 3071.48 | 1.96 | 1.50 |
| | E52H | | | | | | |
| | Y55F | | | | | | |
| | Q70A | | | | | | |
| | I74G | | | | | | |
| | D83K | | | | | | |
| t877269 | E17N | 54266.24 | 2942.08 | 27665.11 | 3953.05 | 1.96 | 0.74 |
| | V31L | | | | | | |
| | D71S | | | | | | |
| | D83A | | | | | | |
| | V84K | | | | | | |
| | T98K | | | | | | |
| t876751 | A18D | 64432.37 | 4566.22 | 32889.15 | 2634.00 | 1.96 | 1.73 |
| | T26R | | | | | | |
| | I33R | | | | | | |
| | E52H | | | | | | |
| | Y55F | | | | | | |
| | Q70A | | | | | | |
| | G80A | | | | | | |
| | D83N | | | | | | |
| | V84K | | | | | | |
| t876801 | V84K | 47956.65 | 3456.69 | 24643.11 | 2195.19 | 1.95 | 1.57 |
| | D83E | | | | | | |
| | D13R | | | | | | |
| | E64D | | | | | | |
| | T98K | | | | | | |
| | S65N | | | | | | |
| t877098 | A18D | 45521.98 | 1851.09 | 23469.52 | 2543.73 | 1.94 | 0.73 |
| | E22K | | | | | | |
| | T26R | | | | | | |
| | I33R | | | | | | |
| | E52H | | | | | | |
| | Y55F | | | | | | |
| | Q70A | | | | | | |
| | G80A | | | | | | |
| | G82R | | | | | | |
| | D83N | | | | | | |
| | V84K | | | | | | |
| t782661 | I33N | 53265.20 | 5799.56 | 27507.95 | 4860.83 | 1.94 | 1.19 |
| | D71S | | | | | | |
| | G80A | | | | | | |
| t877282 | E17N | 39931.21 | 6774.40 | 21054.86 | 8239.13 | 1.90 | 0.82 |
| | A18D | | | | | | |
| | V31L | | | | | | |
| | I33N | | | | | | |
| | E64D | | | | | | |
| | D71S | | | | | | |
| | V84K | | | | | | |
| t877612 | A18D | 56659.73 | 2292.11 | 30064.51 | 1808.49 | 1.88 | 1.27 |
| | T26R | | | | | | |
| | E52H | | | | | | |
| | Y55F | | | | | | |
| | Q70A | | | | | | |
| | G80A | | | | | | |
| | D83N | | | | | | |
| | V84K | | | | | | |
| | Y85F | | | | | | |
| t876957 | V84K | 48689.93 | 3150.24 | 25915.87 | 2344.16 | 1.88 | 1.34 |
| | T26R | | | | | | |
| | D13R | | | | | | |
| | E64D | | | | | | |
| | T98K | | | | | | |
| | S65N | | | | | | |
| t782504 | Wild-type | 53125.92 | 6762.30 | 28431.92 | 4401.36 | 1.87 | 1.54 |
| t876956 | T26R | 51382.83 | 1504.71 | 27606.53 | 2389.77 | 1.86 | 0.63 |
| | I33H | | | | | | |
| | Y55F | | | | | | |
| | Q70A | | | | | | |
| | G80A | | | | | | |
| | D83E | | | | | | |
| | F88N | | | | | | |
| t877090 | D13R | 49781.04 | 3138.95 | 26812.85 | 5759.06 | 1.86 | 0.55 |
| | A18D | | | | | | |
| | N29S | | | | | | |
| | Q70L | | | | | | |
| | I74G | | | | | | |
| | G80A | | | | | | |
| | D83K | | | | | | |
| | Y85F | | | | | | |
| t876810 | E17N | 61011.30 | 1321.57 | 32871.62 | 517.81 | 1.86 | 2.55 |
| | A18D | | | | | | |
| | V31L | | | | | | |
| | E64D | | | | | | |
| | D71S | | | | | | |
| | D83A | | | | | | |
| | V84F | | | | | | |
| | T98K | | | | | | |
| t877138 | D13R | 54129.25 | 2629.03 | 29196.65 | 1079.77 | 1.85 | 2.43 |
| | E17N | | | | | | |
| | V31L | | | | | | |
| | I33N | | | | | | |
| | D71S | | | | | | |
| | V84K | | | | | | |
| t876773 | A18D | 63668.51 | 1650.14 | 34474.82 | 946.43 | 1.85 | 1.74 |
| | T26R | | | | | | |
| | I33R | | | | | | |
| | E52H | | | | | | |
| | Y55F | | | | | | |
| | Q70A | | | | | | |
| | G80A | | | | | | |
| | D83N | | | | | | |
| | V84K | | | | | | |
| t876968 | D13R | 70112.52 | 3302.04 | 37968.56 | 1586.99 | 1.85 | 2.08 |
| | A18D | | | | | | |
| | T26R | | | | | | |
| | N29S | | | | | | |
| | Q70L | | | | | | |
| | D71Q | | | | | | |
| | G80A | | | | | | |
| | D83E | | | | | | |
| t877255 | A18D | 24979.53 | 28870.66 | 13532.39 | 15656.42 | 1.85 | 1.84 |
| | T26R | | | | | | |
| | I33R | | | | | | |
| | D39G | | | | | | |
| | E52H | | | | | | |
| | Y55F | | | | | | |
| | Q70A | | | | | | |
| | G80A | | | | | | |
| | D83E | | | | | | |
| | V84K | | | | | | |
| t876755 | A18D | 63852.13 | 2030.64 | 34631.82 | 1214.55 | 1.84 | 1.67 |
| | T26R | | | | | | |
| | E52H | | | | | | |
| | Y55F | | | | | | |
| | Q70A | | | | | | |
| | G80A | | | | | | |
| | D83N | | | | | | |
| | V84K | | | | | | |
| t876943 | E17N | 50230.13 | 2423.56 | 27315.55 | 2299.52 | 1.84 | 1.05 |
| | V31L | | | | | | |
| | D71S | | | | | | |
| | I74G | | | | | | |
| | D83K | | | | | | |
| | V84F | | | | | | |
| t877367 | E17N | 52450.09 | 1782.81 | 28646.64 | 5843.69 | 1.83 | 0.31 |
| | A18D | | | | | | |
| | V31L | | | | | | |
| | I33N | | | | | | |
| | D71S | | | | | | |
| | V84K | | | | | | |
| | T98Y | | | | | | |
| t877437 | T26R | 55489.85 | 885.19 | 30327.34 | 962.27 | 1.83 | 0.92 |
| | D39G | | | | | | |
| | D83E | | | | | | |
| | D13R | | | | | | |
| | E64D | | | | | | |
| | T98K | | | | | | |
| t876988 | D13R | 56602.94 | 1536.17 | 30942.16 | 3192.03 | 1.83 | 0.48 |
| | A18D | | | | | | |
| | N29S | | | | | | |
| | D39G | | | | | | |
| | Q70L | | | | | | |
| | D71Q | | | | | | |
| | G80A | | | | | | |
| | D83K | | | | | | |
| | V84K | | | | | | |
| t877071 | E17N | 50655.59 | 6007.50 | 27721.38 | 4377.50 | 1.83 | 1.37 |
| | A18D | | | | | | |
| | V31L | | | | | | |
| | E64D | | | | | | |
| | D71S | | | | | | |
| | I74G | | | | | | |
| | D83A | | | | | | |
| | V84F | | | | | | |
| t876753 | T26R | 65312.88 | 3222.63 | 35971.07 | 1458.97 | 1.82 | 2.21 |
| | I33H | | | | | | |
| | Y55F | | | | | | |
| | E64D | | | | | | |
| | Q70A | | | | | | |
| | G80A | | | | | | |
| | D83K | | | | | | |
| | V84K | | | | | | |
| t876878 | A18D | 63615.34 | 2845.67 | 35061.22 | 738.36 | 1.81 | 3.85 |
| | T26R | | | | | | |
| | I33R | | | | | | |
| | E52H | | | | | | |
| | Y55F | | | | | | |
| | S65N | | | | | | |
| | Q70A | | | | | | |
| | G80A | | | | | | |
| | D83N | | | | | | |
| | V84K | | | | | | |
| | T98Y | | | | | | |
| t877610 | D13R | 60117.93 | 2260.25 | 33164.85 | 1600.92 | 1.81 | 1.41 |
| | A18D | | | | | | |
| | T26R | | | | | | |
| | E52H | | | | | | |
| | Y55F | | | | | | |
| | Q70A | | | | | | |
| | G80A | | | | | | |
| | D83N | | | | | | |
| | V84K | | | | | | |
| t877467 | D13R | 50994.55 | 2091.86 | 28164.52 | 1778.31 | 1.81 | 1.18 |
| | E17N | | | | | | |
| | A18D | | | | | | |
| | V31L | | | | | | |
| | D71S | | | | | | |
| | D83E | | | | | | |
| | V84F | | | | | | |
| t877639 | D13R | 58919.01 | 3226.63 | 32615.60 | 1677.97 | 1.81 | 1.92 |
| | A18D | | | | | | |
| | N29S | | | | | | |
| | S65N | | | | | | |
| | Q70L | | | | | | |
| | D71Q | | | | | | |
| | I74G | | | | | | |
| | G80A | | | | | | |
| | D83K | | | | | | |
| t876936 | D71E | 62002.57 | 4090.71 | 34429.04 | 12548.73 | 1.80 | 0.33 |
| | V66Y | | | | | | |
| | E22K | | | | | | |
| | D83K | | | | | | |
| | T98K | | | | | | |
| | D13R | | | | | | |
| t876845 | V84K | 45943.44 | 3805.34 | 25593.74 | 2731.59 | 1.80 | 1.39 |
| | T26R | | | | | | |
| | D39G | | | | | | |
| | D83E | | | | | | |
| | D13R | | | | | | |
| | E64D | | | | | | |
| t877608 | E17N | 53825.58 | 1437.47 | 30042.53 | 1352.02 | 1.79 | 1.06 |
| | V31L | | | | | | |
| | V66Y | | | | | | |
| | D71S | | | | | | |
| | D83A | | | | | | |
| | V84F | | | | | | |
| | Y85F | | | | | | |
| t876882 | A18D | 62211.05 | 2342.43 | 34935.93 | 3007.76 | 1.78 | 0.78 |
| | T26R | | | | | | |
| | E52H | | | | | | |
| | Y55F | | | | | | |
| | Q70A | | | | | | |
| | D71E | | | | | | |
| | G80A | | | | | | |
| | D83N | | | | | | |
| | V84K | | | | | | |
| t877578 | D13R | 56567.60 | 7352.26 | 32014.26 | 1849.16 | 1.77 | 3.98 |
| | A18D | | | | | | |
| | N29S | | | | | | |
| | Q70L | | | | | | |
| | D71Q | | | | | | |
| | G80A | | | | | | |
| | D83K | | | | | | |
| t877577 | D13R | 51844.69 | 6015.37 | 29372.26 | 1666.04 | 1.77 | 3.61 |
| | A18D | | | | | | |
| | N29S | | | | | | |
| | Q70L | | | | | | |
| | D71Q | | | | | | |
| | G80A | | | | | | |
| | D83K | | | | | | |
| t876784 | D13R | 68077.97 | 2122.95 | 38638.31 | 2228.32 | 1.76 | 0.95 |
| | A18D | | | | | | |
| | E22K | | | | | | |
| | N29S | | | | | | |
| | Q70L | | | | | | |
| | D71E | | | | | | |
| | G80A | | | | | | |
| | D83K | | | | | | |
| t877744 | D13R | 55370.92 | 1769.06 | 31470.83 | 903.65 | 1.76 | 1.96 |
| | A18D | | | | | | |
| | T26R | | | | | | |
| | E52H | | | | | | |
| | Y55F | | | | | | |
| | Q70A | | | | | | |
| | G80A | | | | | | |
| | D83N | | | | | | |
| | V84K | | | | | | |
| | T98Y | | | | | | |
| t876980 | D13R | 48818.06 | 1712.04 | 27780.46 | 556.16 | 1.76 | 3.08 |
| | A18D | | | | | | |
| | T26R | | | | | | |
| | I33R | | | | | | |
| | E52H | | | | | | |
| | Y55F | | | | | | |
| | Q70A | | | | | | |
| | G80A | | | | | | |
| | D83N | | | | | | |
| | V84K | | | | | | |
| | Y85F | | | | | | |
| t877741 | E17N | 54880.83 | 1927.15 | 31402.16 | 3011.95 | 1.75 | 0.64 |
| | V31L | | | | | | |
| | S65N | | | | | | |
| | D71S | | | | | | |
| | D83A | | | | | | |
| | V84K | | | | | | |
| t876914 | E17N | 62033.53 | 4019.09 | 35588.43 | 3070.28 | 1.74 | 1.31 |
| | A18D | | | | | | |
| | V31L | | | | | | |
| | V66Y | | | | | | |
| | D71E | | | | | | |
| | D83A | | | | | | |
| | V84F | | | | | | |
| t876778 | D13R | 65144.75 | 3711.83 | 37388.75 | 2663.52 | 1.74 | 1.39 |
| | A18D | | | | | | |
| | N29S | | | | | | |
| | E64D | | | | | | |
| | Q70L | | | | | | |
| | D71Q | | | | | | |
| | G80A | | | | | | |
| | D83K | | | | | | |
| | V84K | | | | | | |
| t876917 | D13R | 54484.93 | 7486.95 | 31352.32 | 1753.53 | 1.74 | 4.27 |
| | A18D | | | | | | |
| | T26R | | | | | | |
| | N29S | | | | | | |
| | Q70L | | | | | | |
| | D71Q | | | | | | |
| | G80A | | | | | | |
| | D83K | | | | | | |
| t877507 | D13R | 57669.72 | 4764.07 | 33271.40 | 2596.12 | 1.73 | 1.84 |
| | E17N | | | | | | |
| | A18D | | | | | | |
| | V31L | | | | | | |
| | D71S | | | | | | |
| | D83K | | | | | | |
| | V84F | | | | | | |
| t877039 | E17N | 43422.75 | 4055.70 | 25090.39 | 1469.59 | 1.73 | 2.76 |
| | A18D | | | | | | |
| | V31L | | | | | | |
| | E64D | | | | | | |
| | D71S | | | | | | |
| | D83A | | | | | | |
| | V84K | | | | | | |
| t876904 | D13R | 66141.66 | 6038.91 | 38337.34 | 2570.39 | 1.73 | 2.35 |
| | A18D | | | | | | |
| | N29S | | | | | | |
| | Q70L | | | | | | |
| | D71E | | | | | | |
| | G80A | | | | | | |
| | D83K | | | | | | |
| t877615 | E17N | 61434.01 | 4434.67 | 35676.87 | 13790.92 | 1.72 | 0.32 |
| | T26R | | | | | | |
| | V31L | | | | | | |
| | D71S | | | | | | |
| | D83K | | | | | | |
| | V84F | | | | | | |
| t877061 | E17N | 53257.10 | 3324.55 | 30936.45 | 3064.13 | 1.72 | 1.08 |
| | A18D | | | | | | |
| | V31L | | | | | | |
| | D71S | | | | | | |
| | D83E | | | | | | |
| | V84F | | | | | | |
| | T98K | | | | | | |
| t876840 | D13R | 69892.25 | 2966.24 | 40994.08 | 2674.04 | 1.70 | 1.11 |
| | A18D | | | | | | |
| | N29S | | | | | | |
| | Q70L | | | | | | |
| | D71Q | | | | | | |
| | G80A | | | | | | |
| | D83K | | | | | | |
| | V84K | | | | | | |
| | Y85F | | | | | | |
| t877471 | E17N | 43661.98 | 29171.98 | 25645.43 | 17118.60 | 1.70 | 1.70 |
| | V31L | | | | | | |
| | D71S | | | | | | |
| | D83E | | | | | | |
| | V84F | | | | | | |
| | T98K | | | | | | |
| t876815 | V84K | 45825.55 | 4088.83 | 26919.71 | 2484.95 | 1.70 | 1.65 |
| | D39G | | | | | | |
| | D83E | | | | | | |
| | D13R | | | | | | |
| | E64D | | | | | | |
| | S65N | | | | | | |
| t877080 | E17N | 27202.36 | 31490.38 | 16017.57 | 18496.58 | 1.70 | 1.70 |
| | A18D | | | | | | |
| | V31L | | | | | | |
| | E64D | | | | | | |
| | D71S | | | | | | |
| | D83K | | | | | | |
| | V84F | | | | | | |
| t877383 | D13R | 56579.90 | 2839.54 | 33334.05 | 2463.72 | 1.70 | 1.15 |
| | A18D | | | | | | |
| | T26R | | | | | | |
| | E52H | | | | | | |
| | Y55F | | | | | | |
| | E64D | | | | | | |
| | Q70A | | | | | | |
| | G80A | | | | | | |
| | D83N | | | | | | |
| | V84K | | | | | | |
| t876802 | A18D | 47318.59 | 6209.25 | 27962.90 | 2462.72 | 1.69 | 2.52 |
| | T26R | | | | | | |
| | E52H | | | | | | |
| | Y55F | | | | | | |
| | Q70A | | | | | | |
| | G80A | | | | | | |
| | D83E | | | | | | |
| | V84K | | | | | | |
| | T98Y | | | | | | |
| t877150 | A18D | 55112.13 | 1557.50 | 32832.41 | 1290.71 | 1.68 | 1.21 |
| | T26R | | | | | | |
| | I33R | | | | | | |
| | D39G | | | | | | |
| | E52H | | | | | | |
| | Y55F | | | | | | |
| | S65N | | | | | | |
| | Q70A | | | | | | |
| | G80A | | | | | | |
| | D83N | | | | | | |
| | V84K | | | | | | |
| t877662 | A18D | 56767.62 | 1891.78 | 33967.79 | 992.94 | 1.67 | 1.91 |
| | T26R | | | | | | |
| | E52H | | | | | | |
| | Y55F | | | | | | |
| | E64D | | | | | | |
| | Q70A | | | | | | |
| | G80A | | | | | | |
| | D83N | | | | | | |
| | V84K | | | | | | |
| | T98K | | | | | | |
| t877593 | D13R | 61619.50 | 2949.19 | 36934.06 | 1572.95 | 1.67 | 1.87 |
| | A18D | | | | | | |
| | N29S | | | | | | |
| | Q70L | | | | | | |
| | D71Q | | | | | | |
| | G80A | | | | | | |
| | D83E | | | | | | |
| t877319 | E17N | 54369.52 | 15021.04 | 32731.93 | 11595.99 | 1.66 | 1.30 |
| | A18D | | | | | | |
| | V31L | | | | | | |
| | D71S | | | | | | |
| | D83A | | | | | | |
| | V84F | | | | | | |
| t877010 | D13R | 50212.28 | 1463.94 | 30313.87 | 2666.87 | 1.66 | 0.55 |
| | A18D | | | | | | |
| | N29S | | | | | | |
| | E64D | | | | | | |
| | S65N | | | | | | |
| | Q70L | | | | | | |
| | D71Q | | | | | | |
| | G80A | | | | | | |
| | D83K | | | | | | |
| t876911 | E17N | 44933.16 | 2769.64 | 27163.22 | 2271.33 | 1.65 | 1.22 |
| | A18D | | | | | | |
| | V31L | | | | | | |
| | D71S | | | | | | |
| | D83K | | | | | | |
| | V84K | | | | | | |
| t876790 | E17N | 42767.90 | 1422.92 | 25886.38 | 2259.19 | 1.65 | 0.63 |
| | V31L | | | | | | |
| | I33N | | | | | | |
| | V66Y | | | | | | |
| | D71S | | | | | | |
| | G82R | | | | | | |
| | V84F | | | | | | |
| t877352 | A18D | 54491.72 | 3151.88 | 33032.73 | 3790.76 | 1.65 | 0.83 |
| | T26R | | | | | | |
| | I33R | | | | | | |
| | E52H | | | | | | |
| | Y55F | | | | | | |
| | E64D | | | | | | |
| | Q70A | | | | | | |
| | G80A | | | | | | |
| | D83N | | | | | | |
| | V84K | | | | | | |
| | T98K | | | | | | |
| t876781 | A18D | 49062.31 | 2690.53 | 30141.20 | 1762.18 | 1.63 | 1.53 |
| | E22K | | | | | | |
| | T26R | | | | | | |
| | E52H | | | | | | |
| | Y55F | | | | | | |
| | Q70A | | | | | | |
| | G80A | | | | | | |
| | D83N | | | | | | |
| | V84K | | | | | | |
| t877581 | T26R | 51086.83 | 790.11 | 31485.27 | 1784.46 | 1.62 | 0.44 |
| | I33H | | | | | | |
| | Y55F | | | | | | |
| | E64D | | | | | | |
| | Q70A | | | | | | |
| | G80A | | | | | | |
| | D83K | | | | | | |
| | T98K | | | | | | |
| t877387 | A18D | 54247.25 | 2901.87 | 33498.88 | 4221.74 | 1.62 | 0.69 |
| | T26R | | | | | | |
| | I33R | | | | | | |
| | E52H | | | | | | |
| | Y55F | | | | | | |
| | Q70A | | | | | | |
| | G80A | | | | | | |
| | D83E | | | | | | |
| | V84K | | | | | | |
| | T98Y | | | | | | |
| t877062 | D13R | 53174.32 | 4952.39 | 32898.77 | 3748.10 | 1.62 | 1.32 |
| | A18D | | | | | | |
| | T26R | | | | | | |
| | N29S | | | | | | |
| | Q70L | | | | | | |
| | D71Q | | | | | | |
| | G80A | | | | | | |
| | D83K | | | | | | |
| | T98K | | | | | | |
| t877397 | D13R | 57542.45 | 10254.51 | 36004.04 | 2810.36 | 1.60 | 3.65 |
| | A18D | | | | | | |
| | N29S | | | | | | |
| | Q70L | | | | | | |
| | D71Q | | | | | | |
| | G80A | | | | | | |
| | D83K | | | | | | |
| | V84K | | | | | | |
| t877031 | D13R | 53912.32 | 2482.86 | 33761.70 | 3118.14 | 1.60 | 0.80 |
| | A18D | | | | | | |
| | T26R | | | | | | |
| | N29S | | | | | | |
| | E64D | | | | | | |
| | Q70L | | | | | | |
| | D71Q | | | | | | |
| | G80A | | | | | | |
| | D83K | | | | | | |
| t877343 | T26R | 59141.53 | 1317.80 | 37312.72 | 3134.04 | 1.59 | 0.42 |
| | D83E | | | | | | |
| | D13R | | | | | | |
| | E64D | | | | | | |
| | T98K | | | | | | |
| | S65N | | | | | | |
| t877356 | A18D | 52102.50 | 4473.06 | 32945.28 | 2417.88 | 1.58 | 1.85 |
| | T26R | | | | | | |
| | I33H | | | | | | |
| | Y55F | | | | | | |
| | Q70A | | | | | | |
| | G80A | | | | | | |
| | D83K | | | | | | |
| | T98K | | | | | | |
| t877374 | D13R | 53161.62 | 3886.75 | 33716.08 | 6694.27 | 1.58 | 0.58 |
| | A18D | | | | | | |
| | N29S | | | | | | |
| | Q70L | | | | | | |
| | G80A | | | | | | |
| | D83E | | | | | | |
| | T98K | | | | | | |
| t877063 | E17N | 45766.54 | 4802.01 | 29062.23 | 1600.35 | 1.57 | 3.00 |
| | A18D | | | | | | |
| | T26R | | | | | | |
| | V31L | | | | | | |
| | D71S | | | | | | |
| | D83K | | | | | | |
| | V84F | | | | | | |
| t877414 | E17N | 49412.38 | 2888.25 | 31403.87 | 3633.12 | 1.57 | 0.79 |
| | V31L | | | | | | |
| | D71S | | | | | | |
| | D83K | | | | | | |
| | V84F | | | | | | |
| | T98K | | | | | | |
| t876776 | E17N | 45250.30 | 1408.77 | 28762.94 | 2425.69 | 1.57 | 0.58 |
| | A18D | | | | | | |
| | V31L | | | | | | |
| | I33N | | | | | | |
| | D71S | | | | | | |
| | V84F | | | | | | |
| t877180 | E17N | 42965.53 | 2933.77 | 27425.53 | 969.64 | 1.57 | 3.03 |
| | V31L | | | | | | |
| | I33N | | | | | | |
| | E64D | | | | | | |
| | D71S | | | | | | |
| | V84K | | | | | | |
| t877503 | A18D | 54727.11 | 838.20 | 35175.07 | 1707.06 | 1.56 | 0.49 |
| | T26R | | | | | | |
| | E52H | | | | | | |
| | Y55F | | | | | | |
| | S65N | | | | | | |
| | Q70A | | | | | | |
| | G80A | | | | | | |
| | D83N | | | | | | |
| | V84K | | | | | | |
| | T98Y | | | | | | |
| t877566 | A18D | 59335.98 | 4118.21 | 38167.15 | 1357.54 | 1.55 | 3.03 |
| | T26R | | | | | | |
| | E52H | | | | | | |
| | Y55F | | | | | | |
| | Q70A | | | | | | |
| | G80A | | | | | | |
| | D83K | | | | | | |
| | V84K | | | | | | |
| | Y85F | | | | | | |
| t877349 | E17N | 55247.91 | 3258.62 | 35623.05 | 413.02 | 1.55 | 7.89 |
| | A18D | | | | | | |
| | V31L | | | | | | |
| | D71S | | | | | | |
| | D83A | | | | | | |
| | V84K | | | | | | |
| t877246 | T26R | 43789.53 | 4556.19 | 28242.40 | 2610.61 | 1.55 | 1.75 |
| | I33H | | | | | | |
| | Y55F | | | | | | |
| | Q70A | | | | | | |
| | G80A | | | | | | |
| | D83E | | | | | | |
| | V84K | | | | | | |
| | Y85A | | | | | | |
| t877626 | A18D | 51276.81 | 3132.15 | 33243.31 | 3045.66 | 1.54 | 1.03 |
| | T26R | | | | | | |
| | I33R | | | | | | |
| | D39G | | | | | | |
| | E52H | | | | | | |
| | Y55F | | | | | | |
| | Q70A | | | | | | |
| | G80A | | | | | | |
| | D83K | | | | | | |
| | V84K | | | | | | |
| t877614 | D13R | 59002.02 | 5566.68 | 38706.25 | 3000.72 | 1.52 | 1.86 |
| | A18D | | | | | | |
| | N29S | | | | | | |
| | S65N | | | | | | |
| | Q70L | | | | | | |
| | D71Q | | | | | | |
| | G80A | | | | | | |
| | D83K | | | | | | |
| | V84K | | | | | | |
| t877511 | D13R | 55323.29 | 1673.57 | 36337.22 | 3803.47 | 1.52 | 0.44 |
| | A18D | | | | | | |
| | N29S | | | | | | |
| | Q70L | | | | | | |
| | G80A | | | | | | |
| | D83K | | | | | | |
| t877705 | D13R | 58682.51 | 1007.68 | 38799.46 | 2267.89 | 1.51 | 0.44 |
| | A18D | | | | | | |
| | T26R | | | | | | |
| | E52H | | | | | | |
| | Y55F | | | | | | |
| | S65N | | | | | | |
| | Q70A | | | | | | |
| | G80A | | | | | | |
| | D83N | | | | | | |
| | V84K | | | | | | |
| t877681 | D13R | 64473.67 | 3661.18 | 42633.55 | 2507.41 | 1.51 | 1.46 |
| | A18D | | | | | | |
| | N29S | | | | | | |
| | Q70L | | | | | | |
| | D71Q | | | | | | |
| | G80A | | | | | | |
| | D83K | | | | | | |
| | T98Y | | | | | | |
| t876883 | T26R | 43635.02 | 6523.95 | 29123.60 | 3584.38 | 1.50 | 1.82 |
| | I33H | | | | | | |
| | Y55F | | | | | | |
| | Q70A | | | | | | |
| | I74G | | | | | | |
| | G80A | | | | | | |
| | D83K | | | | | | |
| | V84K | | | | | | |
| | Y85A | | | | | | |
| t876821 | T26R | 46393.73 | 4393.48 | 31311.04 | 2086.82 | 1.48 | 2.11 |
| | I33H | | | | | | |
| | Y55F | | | | | | |
| | Q70A | | | | | | |
| | G80A | | | | | | |
| | D83K | | | | | | |
| | V84K | | | | | | |
| | Y85A | | | | | | |
| | T98Y | | | | | | |
| t877125 | D13R | 50594.32 | 19519.68 | 34638.15 | 10759.79 | 1.46 | 1.81 |
| | A18D | | | | | | |
| | N29S | | | | | | |
| | Q70L | | | | | | |
| | D71Q | | | | | | |
| | G80A | | | | | | |
| | D83E | | | | | | |
| | T98Y | | | | | | |
| t876760 | D13R | 59978.32 | 5456.33 | 41894.55 | 1871.36 | 1.43 | 2.92 |
| | A18D | | | | | | |
| | N29S | | | | | | |
| | S65N | | | | | | |
| | Q70L | | | | | | |
| | D71Q | | | | | | |
| | G80A | | | | | | |
| | D83K | | | | | | |
| | T98K | | | | | | |
| t877110 | E17N | 44622.97 | 4117.58 | 31752.97 | 2894.48 | 1.41 | 1.42 |
| | V31L | | | | | | |
| | D71S | | | | | | |
| | D83K | | | | | | |
| | V84F | | | | | | |
| | T98Y | | | | | | |
| t877325 | A18D | 53864.14 | 4270.57 | 38400.16 | 1835.27 | 1.40 | 2.33 |
| | T26R | | | | | | |
| | E52H | | | | | | |
| | Y55F | | | | | | |
| | V61S | | | | | | |
| | Q70A | | | | | | |
| | G80A | | | | | | |
| | D83N | | | | | | |
| | V84K | | | | | | |
| | Y85F | | | | | | |
| t877026 | T26R | 41245.64 | 1460.34 | 29622.85 | 1819.79 | 1.39 | 0.80 |
| | I33H | | | | | | |
| | Y55F | | | | | | |
| | S65N | | | | | | |
| | Q70A | | | | | | |
| | I74G | | | | | | |
| | G80A | | | | | | |
| | D83K | | | | | | |
| | Y85A | | | | | | |
| t877654 | D13R | 53277.86 | 2190.22 | 38500.47 | 1193.48 | 1.38 | 1.84 |
| | A18D | | | | | | |
| | N29S | | | | | | |
| | Q70L | | | | | | |
| | D71Q | | | | | | |
| | G80A | | | | | | |
| | D83K | | | | | | |
| | V84K | | | | | | |
| | T98Y | | | | | | |
| t877683 | T26R | 52683.68 | 2906.47 | 38103.66 | 4156.85 | 1.38 | 0.70 |
| | I33H | | | | | | |
| | Y55F | | | | | | |
| | E64D | | | | | | |
| | Q70A | | | | | | |
| | G80A | | | | | | |
| | D83E | | | | | | |
| | Y85A | | | | | | |
| t877152 | E17N | 39982.71 | 3767.63 | 28922.01 | 3159.46 | 1.38 | 1.19 |
| | V31L | | | | | | |
| | I33N | | | | | | |
| | E64D | | | | | | |
| | D71S | | | | | | |
| | V84F | | | | | | |
| | T98Y | | | | | | |
| t877013 | T26R | 50250.86 | 3051.02 | 36921.70 | 3587.18 | 1.36 | 0.85 |
| | I33H | | | | | | |
| | Y55F | | | | | | |
| | E64D | | | | | | |
| | Q70A | | | | | | |
| | G80A | | | | | | |
| | D83K | | | | | | |
| | Y85A | | | | | | |
| t877459 | A18D | 49613.42 | 17677.78 | 36848.27 | 10516.95 | 1.35 | 1.68 |
| | T26R | | | | | | |
| | I33N | | | | | | |
| | E52H | | | | | | |
| | Y55F | | | | | | |
| | Q70A | | | | | | |
| | D71S | | | | | | |
| | G80A | | | | | | |
| | D83N | | | | | | |
| | V84K | | | | | | |
| t877360 | A18D | 55629.74 | 5239.91 | 41344.24 | 3067.91 | 1.35 | 1.71 |
| | T26R | | | | | | |
| | I33H | | | | | | |
| | Y55F | | | | | | |
| | E64D | | | | | | |
| | Q70A | | | | | | |
| | G80A | | | | | | |
| | D83K | | | | | | |
| | Y85A | | | | | | |
| t877323 | T26R | 53155.73 | 2541.27 | 39716.98 | 911.82 | 1.34 | 2.79 |
| | I33H | | | | | | |
| | Y55F | | | | | | |
| | E64D | | | | | | |
| | S65N | | | | | | |
| | Q70A | | | | | | |
| | G80A | | | | | | |
| | D83K | | | | | | |
| t877700 | D13R | 54030.56 | 1091.17 | 40737.22 | 1921.22 | 1.33 | 0.57 |
| | A18D | | | | | | |
| | N29S | | | | | | |
| | V66Y | | | | | | |
| | Q70L | | | | | | |
| | G80A | | | | | | |
| | D83K | | | | | | |
| | Y85F | | | | | | |
| t877114 | E17N | 44154.74 | 5797.62 | 33380.26 | 4354.29 | 1.32 | 1.33 |
| | A18D | | | | | | |
| | V31L | | | | | | |
| | V66Y | | | | | | |
| | D71S | | | | | | |
| | D83A | | | | | | |
| | V84F | | | | | | |
| | Y85F | | | | | | |
| t877743 | D13R | 53182.29 | 3024.92 | 40385.00 | 2265.42 | 1.32 | 1.34 |
| | A18D | | | | | | |
| | E22K | | | | | | |
| | N29S | | | | | | |
| | V66Y | | | | | | |
| | Q70L | | | | | | |
| | G80A | | | | | | |
| | D83K | | | | | | |
| t876903 | D71E | 42448.26 | 2819.85 | 32317.42 | 1854.84 | 1.31 | 1.52 |
| | V66Y | | | | | | |
| | V61S | | | | | | |
| | E22K | | | | | | |
| | D83K | | | | | | |
| | T98K | | | | | | |
| t877509 | T26R | 59558.15 | 6000.20 | 46174.04 | 3308.49 | 1.29 | 1.81 |
| | I33H | | | | | | |
| | Y55F | | | | | | |
| | Q70A | | | | | | |
| | G80A | | | | | | |
| | D83K | | | | | | |
| | Y85A | | | | | | |
| t877072 | E17N | 43184.72 | 13725.25 | 33598.09 | 13119.62 | 1.29 | 1.05 |
| | A18D | | | | | | |
| | V31L | | | | | | |
| | D71S | | | | | | |
| | D83K | | | | | | |
| | V84F | | | | | | |
| | T98Y | | | | | | |
| t877078 | A18D | 46074.38 | 3379.15 | 35855.08 | 1592.37 | 1.29 | 2.12 |
| | T26R | | | | | | |
| | D39G | | | | | | |
| | E52H | | | | | | |
| | Y55F | | | | | | |
| | E64D | | | | | | |
| | Q70A | | | | | | |
| | G80A | | | | | | |
| | D83N | | | | | | |
| | V84K | | | | | | |
| t877167 | E17N | 38952.55 | 26147.79 | 30322.74 | 1220.26 | 1.28 | 21.43 |
| | V31L | | | | | | |
| | D71S | | | | | | |
| | D83A | | | | | | |
| | V84K | | | | | | |
| | Y85F | | | | | | |
| t877275 | D13R | 52433.61 | 2891.17 | 40989.42 | 24382.88 | 1.28 | 0.12 |
| | A18D | | | | | | |
| | N29S | | | | | | |
| | S65N | | | | | | |
| | Q70L | | | | | | |
| | I74G | | | | | | |
| | G80A | | | | | | |
| | D83K | | | | | | |
| t877055 | A18D | 45554.91 | 14223.25 | 35884.72 | 15700.71 | 1.27 | 0.91 |
| | T26R | | | | | | |
| | E52H | | | | | | |
| | Y55F | | | | | | |
| | Q70A | | | | | | |
| | G80A | | | | | | |
| | D83N | | | | | | |
| | V84K | | | | | | |
| | F88N | | | | | | |
| | T98K | | | | | | |
| t877316 | T26R | 48379.93 | 19967.42 | 40767.54 | 17324.29 | 1.19 | 1.15 |
| | I33H | | | | | | |
| | Y55F | | | | | | |
| | Q70A | | | | | | |
| | G80A | | | | | | |
| | D83K | | | | | | |
| | Y85A | | | | | | |
| t876939 | D13R | 46079.32 | 4457.09 | 40107.14 | 4147.24 | 1.15 | 1.07 |
| | A18D | | | | | | |
| | N29S | | | | | | |
| | Q70L | | | | | | |
| | G80A | | | | | | |
| | D83K | | | | | | |
| | V84K | | | | | | |
| | T98K | | | | | | |
| t877447 | T26R | 52568.18 | 2553.16 | 45938.46 | 3375.15 | 1.14 | 0.76 |
| | I33H | | | | | | |
| | Y55F | | | | | | |
| | S65N | | | | | | |
| | Q70A | | | | | | |
| | G80A | | | | | | |
| | D83E | | | | | | |
| | Y85A | | | | | | |
| t877364 | A18D | 52750.13 | 2411.79 | 46905.95 | 3854.75 | 1.12 | 0.63 |
| | T26R | | | | | | |
| | I33H | | | | | | |
| | Y55F | | | | | | |
| | S65N | | | | | | |
| | Q70A | | | | | | |
| | G80A | | | | | | |
| | D83K | | | | | | |
| | Y85A | | | | | | |
| t877321 | D13R | 53063.05 | 2361.30 | 52368.65 | 5735.38 | 1.01 | 0.41 |
| | A18D | | | | | | |
| | N29S | | | | | | |
| | D39G | | | | | | |
| | Q70L | | | | | | |
| | G80A | | | | | | |
| | D83K | | | | | | |
| | Y85F | | | | | | |
| t877292 | D13R | 56027.12 | 3162.02 | 55882.42 | 7195.46 | 1.00 | 0.44 |
| | A18D | | | | | | |
| | N29S | | | | | | |
| | D39G | | | | | | |
| | S65N | | | | | | |
| | Q70L | | | | | | |
| | D71Q | | | | | | |
| | G80A | | | | | | |
| | D83K | | | | | | |
| t877294 | T26R | 42651.87 | 23963.68 | 47518.82 | 19815.28 | 0.90 | 1.21 |
| | I33H | | | | | | |
| | Y55F | | | | | | |
| | Q70A | | | | | | |
| | G80A | | | | | | |
| | D83K | | | | | | |
| t877230 | E17N | 35114.61 | 18324.52 | 45950.68 | 21048.95 | 0.76 | 0.87 |
| | E22K | | | | | | |
| | V31L | | | | | | |
| | D71E | | | | | | |
| | D83A | | | | | | |
| | V84F | | | | | | |
| t782404 | yZsGreen | 30940.47 | 13011.12 | 51357.25 | 15279.63 | 0.60 | 0.85 |
| t877481 | E17N | 383.97 | 767.95 | 20057.91 | 40115.82 | 0.02 | 0.02 |
| | V31L | | | | | | |
| | E64D | | | | | | |
| | D71S | | | | | | |
| | D83A | | | | | | |
| | V84K | | | | | | |
| t877455 | D71E | 365.04 | 730.08 | 19301.83 | 38603.66 | 0.02 | 0.02 |
| | V66Y | | | | | | |
| | E22K | | | | | | |
| | G82R | | | | | | |
| | T98K | | | | | | |
| | D13R | | | | | | |
| t877023 | D13R | 0.00 | 0.00 | 18625.67 | 37251.34 | 0.00 | 0.00 |
| | E17N | | | | | | |
| | A18D | | | | | | |
| | V31L | | | | | | |
| | I33N | | | | | | |
| | D71S | | | | | | |
| | V84K | | | | | | |
| t877057 | E17N | 0.00 | 0.00 | 17235.94 | 34471.88 | 0.00 | 0.00 |
| | V31L | | | | | | |
| | I33N | | | | | | |
| | D71S | | | | | | |
| | D83E | | | | | | |
| | V84K | | | | | | |

TABLE 9B
Activity data for synthetic OAC polypeptides in S. cerevisiae described in
Example 4 and FIGS. 12C-12D.

| | | Olivetolic | Olivetolic | | | | |
|---|---|---|---|---|---|---|---|
| | | Acid | Acid | Olivetol | Olivetol | | |
| | | (ug/L) | (ug/L) | (ug/L) | (ug/L) | | |
| | Mutations | mean | std | mean | std | OA/OL | OA/OL |
| | relative to | t815900 | t815900 | t815900 | t815900 | mean | std |
| | CsOAC | normalized | normalized | normalized | normalized | normalized | normalized |
| | (SEQ ID | (plate | (plate | (plate | (plate | to | to |
| Strain | NO: 1) | mean) | mean) | mean) | mean) | t815900 | t815900 |
| t877598 | E17N | 1.05 | 0.34 | 0.65 | 0.19 | 1.63 | 1.73 |
| | A18D | | | | | | |
| | E22K | | | | | | |
| | V31L | | | | | | |
| | I33N | | | | | | |
| | D71E | | | | | | |
| | V84F | | | | | | |
| t877570 | E17N | 1.1 | 0.21 | 0.85 | 0.07 | 1.3 | 3.04 |
| | V31L | | | | | | |
| | I33N | | | | | | |
| | S65N | | | | | | |
| | D71S | | | | | | |
| | V84K | | | | | | |
| t877091 | E17N | 0.94 | 0.08 | 0.58 | 0.06 | 1.61 | 1.39 |
| | V31L | | | | | | |
| | I33N | | | | | | |
| | D71S | | | | | | |
| | V84K | | | | | | |
| | T98K | | | | | | |
| t876768 | E17N | 0.89 | 0.04 | 0.64 | 0.09 | 1.4 | 0.43 |
| | V31L | | | | | | |
| | D39G | | | | | | |
| | D71S | | | | | | |
| | D83A | | | | | | |
| | V84K | | | | | | |
| t876938 | V84K | 0.91 | 0.06 | 0.74 | 0.08 | 1.24 | 0.79 |
| | T26R | | | | | | |
| | D39G | | | | | | |
| | D13R | | | | | | |
| | T98K | | | | | | |
| | S65N | | | | | | |
| t876909 | E17N | 0.61 | 0.07 | 0.4 | 0.11 | 1.52 | 0.66 |
| | A18D | | | | | | |
| | T26R | | | | | | |
| | V31L | | | | | | |
| | D71S | | | | | | |
| | D83A | | | | | | |
| | V84K | | | | | | |
| t877536 | E17N | 0.87 | 0.04 | 0.63 | 0.02 | 1.37 | 1.75 |
| | A18D | | | | | | |
| | V31L | | | | | | |
| | I33N | | | | | | |
| | D71S | | | | | | |
| | V84K | | | | | | |
| | T98K | | | | | | |
| t876749 | E17N | 0.88 | 0.07 | 0.72 | 0.03 | 1.21 | 2.2 |
| | A18D | | | | | | |
| | T26R | | | | | | |
| | V31L | | | | | | |
| | I33N | | | | | | |
| | D71S | | | | | | |
| | V84K | | | | | | |
| t877477 | A18D | 1.07 | 0.02 | 0.62 | 0.05 | 1.71 | 0.46 |
| | T26R | | | | | | |
| | E52H | | | | | | |
| | Y55F | | | | | | |
| | Q70A | | | | | | |
| | G80A | | | | | | |
| | D83N | | | | | | |
| | V84K | | | | | | |
| | Y85F | | | | | | |
| | F88N | | | | | | |
| t877264 | V84K | 0.63 | 0.04 | 1.15 | 0.12 | 0.54 | 0.34 |
| | T26R | | | | | | |
| | D39G | | | | | | |
| | D83E | | | | | | |
| | D13R | | | | | | |
| | T98K | | | | | | |
| t877554 | E17N | 0.81 | 0.04 | 0.64 | 0.03 | 1.26 | 1.12 |
| | A18D | | | | | | |
| | V31L | | | | | | |
| | I33N | | | | | | |
| | S65N | | | | | | |
| | D71S | | | | | | |
| | V84K | | | | | | |
| t876985 | E17N | 0.87 | 0.03 | 0.71 | 0.14 | 1.23 | 0.24 |
| | V31L | | | | | | |
| | I33N | | | | | | |
| | D71S | | | | | | |
| | G82R | | | | | | |
| | V84F | | | | | | |
| t877362 | E17N | 0.61 | 0.06 | 1.15 | 0.14 | 0.53 | 0.47 |
| | A18D | | | | | | |
| | V31L | | | | | | |
| | I33N | | | | | | |
| | V66Y | | | | | | |
| | D71S | | | | | | |
| | V84F | | | | | | |
| t876764 | D13R | 0.88 | 0.04 | 0.74 | 0.05 | 1.2 | 0.74 |
| | E17N | | | | | | |
| | A18D | | | | | | |
| | V31L | | | | | | |
| | D71S | | | | | | |
| | D83A | | | | | | |
| | V84K | | | | | | |
| t877407 | A18D | 1.09 | 0.03 | 0.67 | 0.05 | 1.62 | 0.75 |
| | E22K | | | | | | |
| | T26R | | | | | | |
| | I33R | | | | | | |
| | E52H | | | | | | |
| | Y55F | | | | | | |
| | V66Y | | | | | | |
| | Q70A | | | | | | |
| | G80A | | | | | | |
| | D83N | | | | | | |
| | V84K | | | | | | |
| t877429 | E17N | 0.62 | 0.02 | 1.19 | 0.04 | 0.52 | 0.52 |
| | A18D | | | | | | |
| | V31L | | | | | | |
| | I33N | | | | | | |
| | D71S | | | | | | |
| | V84K | | | | | | |
| t877431 | E17N | 1.07 | 0.07 | 0.66 | 0.08 | 1.61 | 0.94 |
| | A18D | | | | | | |
| | V31L | | | | | | |
| | I33N | | | | | | |
| | D71E | | | | | | |
| | V84F | | | | | | |
| t877109 | E17N | 0.59 | 0.05 | 0.43 | 0.04 | 1.37 | 1.08 |
| | T26R | | | | | | |
| | V31L | | | | | | |
| | D71S | | | | | | |
| | D83A | | | | | | |
| | V84K | | | | | | |
| t876982 | T26R | 0.93 | 0.04 | 0.68 | 0.13 | 1.35 | 0.32 |
| | D39G | | | | | | |
| | D83E | | | | | | |
| | E64D | | | | | | |
| | T98K | | | | | | |
| | S65N | | | | | | |
| t877136 | E17N | 1.05 | 0.05 | 0.66 | 0.04 | 1.59 | 1.41 |
| | A18D | | | | | | |
| | V31L | | | | | | |
| | D39G | | | | | | |
| | D71S | | | | | | |
| | D83A | | | | | | |
| | V84K | | | | | | |
| t877723 | E17N | 0.73 | 0.17 | 0.58 | 0.2 | 1.25 | 0.86 |
| | A18D | | | | | | |
| | V31L | | | | | | |
| | I33N | | | | | | |
| | D71S | | | | | | |
| | G82R | | | | | | |
| | V84F | | | | | | |
| t877187 | A18D | 1.11 | 0.09 | 0.69 | 0.01 | 1.6 | 8.39 |
| | T26R | | | | | | |
| | I33R | | | | | | |
| | E52H | | | | | | |
| | Y55F | | | | | | |
| | V66Y | | | | | | |
| | Q70A | | | | | | |
| | G80A | | | | | | |
| | D83N | | | | | | |
| | V84K | | | | | | |
| | Y85F | | | | | | |
| t877011 | E17N | 0.85 | 0.08 | 0.74 | 0.04 | 1.15 | 2.14 |
| | A18D | | | | | | |
| | V31L | | | | | | |
| | I33N | | | | | | |
| | D71S | | | | | | |
| | I74G | | | | | | |
| | V84K | | | | | | |
| t877449 | E17N | 0.66 | 0.02 | 1.31 | 0.07 | 0.5 | 0.26 |
| | V31L | | | | | | |
| | I33N | | | | | | |
| | D71S | | | | | | |
| | V84K | | | | | | |
| | Y85F | | | | | | |
| t877712 | E17N | 0.98 | 0.1 | 0.84 | 0.12 | 1.16 | 0.84 |
| | A18D | | | | | | |
| | V31L | | | | | | |
| | D71S | | | | | | |
| | I74G | | | | | | |
| | D83E | | | | | | |
| | V84F | | | | | | |
| t877501 | D39G | 0.91 | 0.05 | 0.79 | 0.06 | 1.15 | 0.92 |
| | D83E | | | | | | |
| | D13R | | | | | | |
| | E64D | | | | | | |
| | T98K | | | | | | |
| | S65N | | | | | | |
| t876853 | E17N | 0.89 | 0.11 | 0.79 | 0.08 | 1.14 | 1.41 |
| | A18D | | | | | | |
| | V31L | | | | | | |
| | S65N | | | | | | |
| | D71S | | | | | | |
| | D83A | | | | | | |
| | V84K | | | | | | |
| t877644 | E17N | 0.9 | 0.13 | 0.74 | 0.13 | 1.22 | 1.05 |
| | A18D | | | | | | |
| | V31L | | | | | | |
| | I33N | | | | | | |
| | D71S | | | | | | |
| | D83K | | | | | | |
| | V84K | | | | | | |
| t877056 | T26R | 0.92 | 0.05 | 0.71 | 0.04 | 1.3 | 1.3 |
| | D39G | | | | | | |
| | D83E | | | | | | |
| | D13R | | | | | | |
| | T98K | | | | | | |
| | S65N | | | | | | |
| t877014 | E17N | 0.96 | 0.07 | 0.74 | 0.03 | 1.3 | 2.29 |
| | A18D | | | | | | |
| | E22K | | | | | | |
| | V31L | | | | | | |
| | D71E | | | | | | |
| | D83A | | | | | | |
| | V84F | | | | | | |
| t877228 | D13R | 1.11 | 0.02 | 0.73 | 0.02 | 1.53 | 0.95 |
| | A18D | | | | | | |
| | N29S | | | | | | |
| | Q70L | | | | | | |
| | D71Q | | | | | | |
| | G80A | | | | | | |
| | D83E | | | | | | |
| | T98K | | | | | | |
| t876933 | V84K | 0.91 | 0.07 | 0.71 | 0.02 | 1.29 | 4.17 |
| | T26R | | | | | | |
| | D39G | | | | | | |
| | D13R | | | | | | |
| | E64D | | | | | | |
| | S65N | | | | | | |
| t876870 | E17N | 0.88 | 0.05 | 0.85 | 0.05 | 1.04 | 0.96 |
| | A18D | | | | | | |
| | V31L | | | | | | |
| | I33N | | | | | | |
| | D71S | | | | | | |
| | D83E | | | | | | |
| | V84K | | | | | | |
| t877158 | V84K | 1.06 | 0.15 | 0.86 | 0.06 | 1.23 | 2.63 |
| | T26R | | | | | | |
| | D83E | | | | | | |
| | D13R | | | | | | |
| | E64D | | | | | | |
| | T98K | | | | | | |
| t877223 | E22K | 1.03 | 0.08 | 0.68 | 0.04 | 1.52 | 2.14 |
| | T26R | | | | | | |
| | I33H | | | | | | |
| | Y55F | | | | | | |
| | Q70A | | | | | | |
| | D71E | | | | | | |
| | G80A | | | | | | |
| | D83K | | | | | | |
| t877441 | D13R | 1.03 | 0.08 | 0.69 | 0.07 | 1.49 | 1.14 |
| | A18D | | | | | | |
| | N29S | | | | | | |
| | Q70L | | | | | | |
| | D71Q | | | | | | |
| | I74G | | | | | | |
| | G80A | | | | | | |
| | D83K | | | | | | |
| | T98K | | | | | | |
| t877227 | A18D | 1.08 | 0.11 | 0.72 | 0.13 | 1.5 | 0.88 |
| | T26R | | | | | | |
| | I33R | | | | | | |
| | E52H | | | | | | |
| | Y55F | | | | | | |
| | Q70A | | | | | | |
| | D71E | | | | | | |
| | G80A | | | | | | |
| | D83N | | | | | | |
| | V84K | | | | | | |
| t877534 | V84K | 0.94 | 0.07 | 0.81 | 0.05 | 1.17 | 1.5 |
| | T26R | | | | | | |
| | D39G | | | | | | |
| | D83E | | | | | | |
| | T98K | | | | | | |
| | S65N | | | | | | |
| t876945 | E17N | 0.89 | 0.07 | 0.72 | 0.08 | 1.23 | 0.85 |
| | V31L | | | | | | |
| | I33N | | | | | | |
| | D71S | | | | | | |
| | V84K | | | | | | |
| | T98Y | | | | | | |
| t876987 | E17N | 0.91 | 0.11 | 0.85 | 0.07 | 1.07 | 1.63 |
| | V31L | | | | | | |
| | D71S | | | | | | |
| | D83A | | | | | | |
| | V84F | | | | | | |
| | T98Y | | | | | | |
| t877645 | E17N | 1.05 | 0.15 | 1.07 | 0.07 | 0.97 | 2.03 |
| | E22K | | | | | | |
| | V31L | | | | | | |
| | I33N | | | | | | |
| | D71E | | | | | | |
| | V84F | | | | | | |
| t877404 | E17N | 1.02 | 0.03 | 0.7 | 0.03 | 1.46 | 1.07 |
| | A18D | | | | | | |
| | V31L | | | | | | |
| | D71S | | | | | | |
| | I74G | | | | | | |
| | D83A | | | | | | |
| | V84K | | | | | | |
| t877718 | E17N | 0.9 | 0.02 | 0.79 | 0.05 | 1.14 | 0.39 |
| | A18D | | | | | | |
| | V31L | | | | | | |
| | D71E | | | | | | |
| | D83A | | | | | | |
| | V84F | | | | | | |
| t877698 | E17N | 0.9 | 0.18 | 0.84 | 0.19 | 1.07 | 0.98 |
| | A18D | | | | | | |
| | V31L | | | | | | |
| | D71S | | | | | | |
| | D83E | | | | | | |
| | V84F | | | | | | |
| | T98Y | | | | | | |
| t876959 | A18D | 0.94 | 0.1 | 0.89 | 0.09 | 1.06 | 1.14 |
| | T26R | | | | | | |
| | D39G | | | | | | |
| | E52H | | | | | | |
| | Y55F | | | | | | |
| | Q70A | | | | | | |
| | G80A | | | | | | |
| | D83N | | | | | | |
| | V84K | | | | | | |
| | T98K | | | | | | |
| t877021 | E17N | 0.91 | 0.05 | 0.86 | 0.03 | 1.06 | 1.52 |
| | V31L | | | | | | |
| | I33N | | | | | | |
| | V66Y | | | | | | |
| | D71S | | | | | | |
| | V84F | | | | | | |
| t877702 | E17N | 0.94 | 0.08 | 0.83 | 0.18 | 1.13 | 0.44 |
| | V31L | | | | | | |
| | D71S | | | | | | |
| | D83E | | | | | | |
| | V84F | | | | | | |
| | T98Y | | | | | | |
| t876990 | V84K | 0.92 | 0.03 | 0.77 | 0.05 | 1.2 | 0.56 |
| | D39G | | | | | | |
| | D13R | | | | | | |
| | E64D | | | | | | |
| | T98K | | | | | | |
| | S65N | | | | | | |
| t876772 | E17N | 0.78 | 0.08 | 0.75 | 0.04 | 1.04 | 1.99 |
| | A18D | | | | | | |
| | V31L | | | | | | |
| | I33N | | | | | | |
| | V66Y | | | | | | |
| | D71E | | | | | | |
| | V84F | | | | | | |
| t877248 | E17N | 0.67 | 0.33 | 0.58 | 0.68 | 1.15 | 0.49 |
| | A18D | | | | | | |
| | V31L | | | | | | |
| | I33N | | | | | | |
| | D71S | | | | | | |
| | I74G | | | | | | |
| | D83K | | | | | | |
| | V84F | | | | | | |
| t877510 | E17N | 0.92 | 0.07 | 0.84 | 0.04 | 1. 1 | 1.6 |
| | T26R | | | | | | |
| | V31L | | | | | | |
| | D71S | | | | | | |
| | D83E | | | | | | |
| | V84F | | | | | | |
| t877258 | E17N | 0.66 | 0.08 | 1.49 | 0.22 | 0.44 | 0.37 |
| | V31L | | | | | | |
| | I33N | | | | | | |
| | E64D | | | | | | |
| | D71S | | | | | | |
| | V84F | | | | | | |
| t877088 | E17N | 0.9 | 0.07 | 0.77 | 0.04 | 1.17 | 1.76 |
| | V31L | | | | | | |
| | I33N | | | | | | |
| | D71S | | | | | | |
| | D83K | | | | | | |
| | V84K | | | | | | |
| t877516 | V84K | 0.84 | 0.04 | 0.82 | 0.05 | 1.03 | 0.71 |
| | D39G | | | | | | |
| | D83E | | | | | | |
| | D13R | | | | | | |
| | T98K | | | | | | |
| | S65N | | | | | | |
| t877306 | A18D | 0.96 | 0.08 | 0.85 | 0.09 | 1.13 | 0.86 |
| | T26R | | | | | | |
| | I33R | | | | | | |
| | E52H | | | | | | |
| | Y55F | | | | | | |
| | S65N | | | | | | |
| | Q70A | | | | | | |
| | G80A | | | | | | |
| | D83E | | | | | | |
| | V84K | | | | | | |
| t877188 | A18D | 1.08 | 0.08 | 0.95 | 0.06 | 1.13 | 1.32 |
| | T26R | | | | | | |
| | I33R | | | | | | |
| | E52H | | | | | | |
| | Y55F | | | | | | |
| | V66Y | | | | | | |
| | Q70A | | | | | | |
| | D71E | | | | | | |
| | G80A | | | | | | |
| | D83N | | | | | | |
| | V84K | | | | | | |
| t876766 | E17N | 0.84 | 0.06 | 0.83 | 0.08 | 1.01 | 0.79 |
| | A18D | | | | | | |
| | V31L | | | | | | |
| | I33N | | | | | | |
| | D39G | | | | | | |
| | D71S | | | | | | |
| | V84K | | | | | | |
| t877629 | E17N | 0.82 | 0.05 | 0.8 | 0.05 | 1.02 | 0.91 |
| | A18D | | | | | | |
| | V31L | | | | | | |
| | D71S | | | | | | |
| | D83A | | | | | | |
| | V84K | | | | | | |
| | T98Y | | | | | | |
| t876865 | V84K | 0.79 | 0.05 | 0.79 | 0.02 | 1 | 2.87 |
| | T26R | | | | | | |
| | D39G | | | | | | |
| | D83E | | | | | | |
| | E64D | | | | | | |
| | S65N | | | | | | |
| t876782 | A18D | 0.88 | 0.06 | 0.95 | 0.06 | 0.93 | 1.1 |
| | T26R | | | | | | |
| | I33R | | | | | | |
| | D39G | | | | | | |
| | E52H | | | | | | |
| | Y55F | | | | | | |
| | E64D | | | | | | |
| | Q70A | | | | | | |
| | G80A | | | | | | |
| | D83N | | | | | | |
| | V84K | | | | | | |
| t877108 | A18D | 0.93 | 0.12 | 0.83 | 0.06 | 1.12 | 2.15 |
| | T26R | | | | | | |
| | E52H | | | | | | |
| | Y55F | | | | | | |
| | E64D | | | | | | |
| | Q70A | | | | | | |
| | I74G | | | | | | |
| | G80A | | | | | | |
| | D83N | | | | | | |
| | V84K | | | | | | |
| t877164 | D13R | 1.02 | 0.02 | 0.76 | 0.05 | 1.36 | 0.43 |
| | A18D | | | | | | |
| | N29S | | | | | | |
| | E64D | | | | | | |
| | Q70L | | | | | | |
| | D71Q | | | | | | |
| | G80A | | | | | | |
| | D83E | | | | | | |
| t877256 | T26R | 0.99 | 0.13 | 0.88 | 0.07 | 1.11 | 1.71 |
| | I33H | | | | | | |
| | Y55F | | | | | | |
| | Q70A | | | | | | |
| | I74G | | | | | | |
| | G80A | | | | | | |
| | D83K | | | | | | |
| | Y85A | | | | | | |
| t877596 | D13R | 1 | 0.1 | 0.79 | 0.31 | 1.26 | 0.33 |
| | A18D | | | | | | |
| | E22K | | | | | | |
| | N29S | | | | | | |
| | Q70L | | | | | | |
| | D71Q | | | | | | |
| | G80A | | | | | | |
| | D83K | | | | | | |
| t877249 | E17N | 0.83 | 0.51 | 0.6 | 0.33 | 1.37 | 1.54 |
| | A18D | | | | | | |
| | V31L | | | | | | |
| | D71S | | | | | | |
| | D83A | | | | | | |
| | V84K | | | | | | |
| | Y85F | | | | | | |
| t877439 | D13R | 1.03 | 0.06 | 0.77 | 0.04 | 1.35 | 1.67 |
| | A18D | | | | | | |
| | N29S | | | | | | |
| | E64D | | | | | | |
| | Q70L | | | | | | |
| | D71Q | | | | | | |
| | G80A | | | | | | |
| | D83K | | | | | | |
| t815900 | E17N | 1 | 0.04 | 1 | 0.11 | 1 | 0.31 |
| | A18D | | | | | | |
| | V31L | | | | | | |
| | D71S | | | | | | |
| | D83A | | | | | | |
| | V84F | | | | | | |
| t877444 | E17N | 1.12 | 0.09 | 0.82 | 0.02 | 1.37 | 3.86 |
| | A18D | | | | | | |
| | V31L | | | | | | |
| | I33N | | | | | | |
| | D71S | | | | | | |
| | G80A | | | | | | |
| | V84F | | | | | | |
| t877064 | E17N | 0.85 | 0.08 | 0.75 | 0.07 | 1.14 | 1.17 |
| | A18D | | | | | | |
| | V31L | | | | | | |
| | D71S | | | | | | |
| | D83K | | | | | | |
| | V84F | | | | | | |
| t877229 | V84K | 0.97 | 0.01 | 0.72 | 0.08 | 1.36 | 0.14 |
| | T26R | | | | | | |
| | D39G | | | | | | |
| | D83E | | | | | | |
| | D13R | | | | | | |
| | S65N | | | | | | |
| t876807 | E17N | 0.98 | 0.06 | 0.86 | 0.05 | 1.13 | 1.23 |
| | V31L | | | | | | |
| | I33N | | | | | | |
| | D39G | | | | | | |
| | D71S | | | | | | |
| | V84K | | | | | | |
| t877304 | E17N | 0.64 | 0.07 | 1.49 | 0.05 | 0.43 | 1.24 |
| | V31L | | | | | | |
| | I33N | | | | | | |
| | V66Y | | | | | | |
| | D71E | | | | | | |
| | V84F | | | | | | |
| t877320 | D13R | 1.04 | 0.1 | 0.77 | 0.12 | 1.35 | 0.87 |
| | A18D | | | | | | |
| | T26R | | | | | | |
| | D39G | | | | | | |
| | E52H | | | | | | |
| | Y55F | | | | | | |
| | Q70A | | | | | | |
| | G80A | | | | | | |
| | D83N | | | | | | |
| | V84K | | | | | | |
| t877667 | E17N | 1.02 | 0.04 | 1.14 | 0.03 | 0.89 | 1.34 |
| | V31L | | | | | | |
| | I33N | | | | | | |
| | D71E | | | | | | |
| | G82R | | | | | | |
| | V84F | | | | | | |
| t877625 | E17N | 0.82 | 0.06 | 0.83 | 0.08 | 0.99 | 0.72 |
| | A18D | | | | | | |
| | T26R | | | | | | |
| | V31L | | | | | | |
| | D71S | | | | | | |
| | D83E | | | | | | |
| | V84F | | | | | | |
| t877354 | E17N | 0.61 | 0.08 | 1.44 | 0.28 | 0.42 | 0.27 |
| | V31L | | | | | | |
| | I33N | | | | | | |
| | D71S | | | | | | |
| | D83K | | | | | | |
| | V84F | | | | | | |
| | T98Y | | | | | | |
| t877544 | V84K | 0.87 | 0.28 | 0.93 | 0.11 | 0.94 | 2.5 |
| | D39G | | | | | | |
| | D83E | | | | | | |
| | D13R | | | | | | |
| | E64D | | | | | | |
| | T98K | | | | | | |
| t877616 | T26R | 0.92 | 0.04 | 0.89 | 0.03 | 1.03 | 1.4 |
| | I33H | | | | | | |
| | Y55F | | | | | | |
| | Q70A | | | | | | |
| | G80A | | | | | | |
| | D83K | | | | | | |
| | V84K | | | | | | |
| | F88N | | | | | | |
| t877185 | D13R | 1.06 | 0.04 | 0.8 | 0.19 | 1.32 | 0.2 |
| | E17N | | | | | | |
| | V31L | | | | | | |
| | D71S | | | | | | |
| | D83A | | | | | | |
| | V84K | | | | | | |
| t877620 | A18D | 0.91 | 0.1 | 0.88 | 0.04 | 1.03 | 2.26 |
| | E22K | | | | | | |
| | T26R | | | | | | |
| | E52H | | | | | | |
| | Y55F | | | | | | |
| | Q70A | | | | | | |
| | D71E | | | | | | |
| | G80A | | | | | | |
| | D83N | | | | | | |
| | V84K | | | | | | |
| t877709 | E17N | 0.89 | 0.1 | 0.86 | 0.29 | 1.02 | 0.34 |
| | T26R | | | | | | |
| | V31L | | | | | | |
| | I33N | | | | | | |
| | E64D | | | | | | |
| | D71S | | | | | | |
| | V84F | | | | | | |
| t877073 | V84K | 0.9 | 0.08 | 0.83 | 0.18 | 1.09 | 0.47 |
| | T26R | | | | | | |
| | D39G | | | | | | |
| | D13R | | | | | | |
| | E64D | | | | | | |
| | T98K | | | | | | |
| t861745 | D39Q | 0.99 | 0.08 | 0.9 | 0.07 | 1.09 | 1.11 |
| | F95M | | | | | | |
| t876837 | T26R | 0.97 | 0.04 | 0.89 | 0.12 | 1.09 | 0.34 |
| | I33H | | | | | | |
| | Y55F | | | | | | |
| | Q70A | | | | | | |
| | G80A | | | | | | |
| | D83E | | | | | | |
| | T98K | | | | | | |
| t876806 | D13R | 0.89 | 0.04 | 1.01 | 0.05 | 0.88 | 0.82 |
| | A18D | | | | | | |
| | T26R | | | | | | |
| | E52H | | | | | | |
| | Y55F | | | | | | |
| | Q70A | | | | | | |
| | G80A | | | | | | |
| | D83N | | | | | | |
| | V84K | | | | | | |
| | Y85F | | | | | | |
| t876826 | A18D | 0.89 | 0 | 0.82 | 0.08 | 1.09 | 0.06 |
| | T26R | | | | | | |
| | D39G | | | | | | |
| | E52H | | | | | | |
| | Y55F | | | | | | |
| | Q70A | | | | | | |
| | I74G | | | | | | |
| | G80A | | | | | | |
| | D83N | | | | | | |
| | V84K | | | | | | |
| t877087 | V84K | 0.81 | 0.03 | 0.74 | 0.04 | 1.09 | 0.86 |
| | D39G | | | | | | |
| | D83E | | | | | | |
| | E64D | | | | | | |
| | T98K | | | | | | |
| | S65N | | | | | | |
| t877290 | V84K | 0.64 | 0.05 | 1.55 | 0.06 | 0.41 | 0.73 |
| | T26R | | | | | | |
| | D83E | | | | | | |
| | D13R | | | | | | |
| | T98K | | | | | | |
| | S65N | | | | | | |
| t877100 | T26R | 0.91 | 0.07 | 0.97 | 0.08 | 0.94 | 0.92 |
| | I33N | | | | | | |
| | Y55F | | | | | | |
| | Q70A | | | | | | |
| | D71S | | | | | | |
| | G80A | | | | | | |
| | D83K | | | | | | |
| t861743 | I33R | 0.96 | 0.09 | 0.89 | 0.1 | 1.08 | 0.83 |
| | E52H | | | | | | |
| | Y55F | | | | | | |
| | Q70A | | | | | | |
| | I74G | | | | | | |
| | D83K | | | | | | |
| t877269 | E17N | 1.02 | 0.06 | 0.79 | 0.11 | 1.29 | 0.49 |
| | V31L | | | | | | |
| | D71S | | | | | | |
| | D83A | | | | | | |
| | V84K | | | | | | |
| | T98K | | | | | | |
| t876751 | A18D | 0.88 | 0.06 | 1.01 | 0.08 | 0.87 | 0.77 |
| | T26R | | | | | | |
| | I33R | | | | | | |
| | E52H | | | | | | |
| | Y55F | | | | | | |
| | Q70A | | | | | | |
| | G80A | | | | | | |
| | D83N | | | | | | |
| | V84K | | | | | | |
| t876801 | V84K | 0.84 | 0.06 | 0.9 | 0.08 | 0.93 | 0.75 |
| | D83E | | | | | | |
| | D13R | | | | | | |
| | E64D | | | | | | |
| | T98K | | | | | | |
| | S65N | | | | | | |
| t877098 | A18D | 0.79 | 0.03 | 0.86 | 0.09 | 0.93 | 0.35 |
| | E22K | | | | | | |
| | T26R | | | | | | |
| | I33R | | | | | | |
| | E52H | | | | | | |
| | Y55F | | | | | | |
| | Q70A | | | | | | |
| | G80A | | | | | | |
| | G82R | | | | | | |
| | D83N | | | | | | |
| | V84K | | | | | | |
| t782661 | I33N | 0.89 | 0.11 | 0.96 | 0.2 | 0.93 | 0.55 |
| | D71S | | | | | | |
| | G80A | | | | | | |
| t877282 | E17N | 0.84 | 0.14 | 0.83 | 0.33 | 1.01 | 0.44 |
| | A18D | | | | | | |
| | V31L | | | | | | |
| | I33N | | | | | | |
| | E64D | | | | | | |
| | D71S | | | | | | |
| | V84K | | | | | | |
| t877612 | A18D | 0.88 | 0.04 | 0.91 | 0.05 | 0.97 | 0.65 |
| | T26R | | | | | | |
| | E52H | | | | | | |
| | Y55F | | | | | | |
| | Q70A | | | | | | |
| | G80A | | | | | | |
| | D83N | | | | | | |
| | V84K | | | | | | |
| | Y85F | | | | | | |
| t876957 | V84K | 0.85 | 0.05 | 0.94 | 0.09 | 0.9 | 0.64 |
| | T26R | | | | | | |
| | D13R | | | | | | |
| | E64D | | | | | | |
| | T98K | | | | | | |
| | S65N | | | | | | |
| t782504 | | 0.89 | 0.13 | 1 | 0.23 | 0.9 | 0.59 |
| t876956 | T26R | 0.95 | 0.03 | 0.93 | 0.08 | 1.02 | 0.35 |
| | I33H | | | | | | |
| | Y55F | | | | | | |
| | Q70A | | | | | | |
| | G80A | | | | | | |
| | D83E | | | | | | |
| | F88N | | | | | | |
| t877090 | D13R | 0.87 | 0.05 | 0.98 | 0.21 | 0.89 | 0.26 |
| | A18D | | | | | | |
| | N29S | | | | | | |
| | Q70L | | | | | | |
| | I74G | | | | | | |
| | G80A | | | | | | |
| | D83K | | | | | | |
| | Y85F | | | | | | |
| t876810 | E17N | 0.83 | 0.02 | 1.01 | 0.02 | 0.82 | 1.13 |
| | A18D | | | | | | |
| | V31L | | | | | | |
| | E64D | | | | | | |
| | D71S | | | | | | |
| | D83A | | | | | | |
| | V84F | | | | | | |
| | T98K | | | | | | |
| t877138 | D13R | 1.06 | 0.05 | 0.88 | 0.03 | 1.2 | 1.58 |
| | E17N | | | | | | |
| | V31L | | | | | | |
| | I33N | | | | | | |
| | D71S | | | | | | |
| | V84K | | | | | | |
| t876773 | A18D | 0.87 | 0.02 | 1.06 | 0.03 | 0.82 | 0.77 |
| | T26R | | | | | | |
| | I33R | | | | | | |
| | E52H | | | | | | |
| | Y55F | | | | | | |
| | Q70A | | | | | | |
| | G80A | | | | | | |
| | D83N | | | | | | |
| | V84K | | | | | | |
| t876968 | D13R | 0.95 | 0.04 | 1.16 | 0.05 | 0.82 | 0.92 |
| | A18D | | | | | | |
| | T26R | | | | | | |
| | N29S | | | | | | |
| | Q70L | | | | | | |
| | D71Q | | | | | | |
| | G80A | | | | | | |
| | D83E | | | | | | |
| t877255 | A18D | 0.47 | 0.54 | 0.39 | 0.45 | 1.21 | 1.21 |
| | T26R | | | | | | |
| | I33R | | | | | | |
| | D39G | | | | | | |
| | E52H | | | | | | |
| | Y55F | | | | | | |
| | Q70A | | | | | | |
| | G80A | | | | | | |
| | D83E | | | | | | |
| | V84K | | | | | | |
| t876755 | A18D | 0.87 | 0.03 | 1.06 | 0.04 | 0.82 | 0.74 |
| | T26R | | | | | | |
| | E52H | | | | | | |
| | Y55F | | | | | | |
| | Q70A | | | | | | |
| | G80A | | | | | | |
| | D83N | | | | | | |
| | V84K | | | | | | |
| t876943 | E17N | 0.9 | 0.04 | 0.89 | 0.08 | 1.01 | 0.58 |
| | V31L | | | | | | |
| | D71S | | | | | | |
| | I74G | | | | | | |
| | D83K | | | | | | |
| | V84F | | | | | | |
| t877367 | E17N | 0.99 | 0.03 | 0.82 | 0.17 | 1.2 | 0.2 |
| | A18D | | | | | | |
| | V31L | | | | | | |
| | I33N | | | | | | |
| | D71S | | | | | | |
| | V84K | | | | | | |
| | T98Y | | | | | | |
| t877437 | T26R | 1.08 | 0.02 | 0.91 | 0.03 | 1.19 | 0.6 |
| | D39G | | | | | | |
| | D83E | | | | | | |
| | D13R | | | | | | |
| | E64D | | | | | | |
| | T98K | | | | | | |
| t876988 | D13R | 1.05 | 0.03 | 1.04 | 0.11 | 1.01 | 0.26 |
| | A18D | | | | | | |
| | N29S | | | | | | |
| | D39G | | | | | | |
| | Q70L | | | | | | |
| | D71Q | | | | | | |
| | G80A | | | | | | |
| | D83K | | | | | | |
| | V84K | | | | | | |
| t877071 | E17N | 0.94 | 0.11 | 0.94 | 0.15 | 1.01 | 0.76 |
| | A18D | | | | | | |
| | V31L | | | | | | |
| | E64D | | | | | | |
| | D71S | | | | | | |
| | I74G | | | | | | |
| | D83A | | | | | | |
| | V84F | | | | | | |
| t876753 | T26R | 0.89 | 0.04 | 1.1 | 0.04 | 0.81 | 0.98 |
| | I33H | | | | | | |
| | Y55F | | | | | | |
| | E64D | | | | | | |
| | Q70A | | | | | | |
| | G80A | | | | | | |
| | D83K | | | | | | |
| | V84K | | | | | | |
| t876878 | A18D | 0.87 | 0.04 | 1.07 | 0.02 | 0.81 | 1.71 |
| | T26R | | | | | | |
| | I33R | | | | | | |
| | E52H | | | | | | |
| | Y55F | | | | | | |
| | S65N | | | | | | |
| | Q70A | | | | | | |
| | G80A | | | | | | |
| | D83N | | | | | | |
| | V84K | | | | | | |
| | T98Y | | | | | | |
| t877610 | D13R | 0.93 | 0.04 | 1 | 0.05 | 0.93 | 0.72 |
| | A18D | | | | | | |
| | T26R | | | | | | |
| | E52H | | | | | | |
| | Y55F | | | | | | |
| | Q70A | | | | | | |
| | G80A | | | | | | |
| | D83N | | | | | | |
| | V84K | | | | | | |
| t877467 | D13R | 1 | 0.04 | 0.85 | 0.05 | 1.17 | 0.76 |
| | E17N | | | | | | |
| | A18D | | | | | | |
| | V31L | | | | | | |
| | D71S | | | | | | |
| | D83E | | | | | | |
| | V84F | | | | | | |
| t877639 | D13R | 1.01 | 0.06 | 1.28 | 0.07 | 0.79 | 0.84 |
| | A18D | | | | | | |
| | N29S | | | | | | |
| | S65N | | | | | | |
| | Q70L | | | | | | |
| | D71Q | | | | | | |
| | I74G | | | | | | |
| | G80A | | | | | | |
| | D83K | | | | | | |
| t876936 | D71E | 0.84 | 0.06 | 1.05 | 0.38 | 0.8 | 0.14 |
| | V66Y | | | | | | |
| | E22K | | | | | | |
| | D83K | | | | | | |
| | T98K | | | | | | |
| | D13R | | | | | | |
| t876845 | V84K | 0.83 | 0.07 | 0.84 | 0.09 | 0.99 | 0.77 |
| | T26R | | | | | | |
| | D39G | | | | | | |
| | D83E | | | | | | |
| | D13R | | | | | | |
| | E64D | | | | | | |
| t877608 | E17N | 0.84 | 0.02 | 0.91 | 0.04 | 0.92 | 0.55 |
| | V31L | | | | | | |
| | V66Y | | | | | | |
| | D71S | | | | | | |
| | D83A | | | | | | |
| | V84F | | | | | | |
| | Y85F | | | | | | |
| t876882 | A18D | 0.85 | 0.03 | 1.07 | 0.09 | 0.79 | 0.35 |
| | T26R | | | | | | |
| | E52H | | | | | | |
| | Y55F | | | | | | |
| | Q70A | | | | | | |
| | D71E | | | | | | |
| | G80A | | | | | | |
| | D83N | | | | | | |
| | V84K | | | | | | |
| t877578 | D13R | 0.91 | 0.12 | 1.07 | 0.06 | 0.85 | 1.92 |
| | A18D | | | | | | |
| | N29S | | | | | | |
| | Q70L | | | | | | |
| | D71Q | | | | | | |
| | G80A | | | | | | |
| | D83K | | | | | | |
| t877577 | D13R | 0.84 | 0.1 | 0.98 | 0.06 | 0.85 | 1.75 |
| | A18D | | | | | | |
| | N29S | | | | | | |
| | Q70L | | | | | | |
| | D71Q | | | | | | |
| | G80A | | | | | | |
| | D83K | | | | | | |
| t876784 | D13R | 0.93 | 0.03 | 1.18 | 0.07 | 0.78 | 0.42 |
| | A18D | | | | | | |
| | E22K | | | | | | |
| | N29S | | | | | | |
| | Q70L | | | | | | |
| | D71E | | | | | | |
| | G80A | | | | | | |
| | D83K | | | | | | |
| t877744 | D13R | 0.89 | 0.03 | 1.05 | 0.03 | 0.85 | 0.95 |
| | A18D | | | | | | |
| | T26R | | | | | | |
| | E52H | | | | | | |
| | Y55F | | | | | | |
| | Q70A | | | | | | |
| | G80A | | | | | | |
| | D83N | | | | | | |
| | V84K | | | | | | |
| | T98Y | | | | | | |
| t876980 | D13R | 0.91 | 0.03 | 0.94 | 0.02 | 0.97 | 1.69 |
| | A18D | | | | | | |
| | T26R | | | | | | |
| | I33R | | | | | | |
| | E52H | | | | | | |
| | Y55F | | | | | | |
| | Q70A | | | | | | |
| | G80A | | | | | | |
| | D83N | | | | | | |
| | V84K | | | | | | |
| | Y85F | | | | | | |
| t877741 | E17N | 0.89 | 0.03 | 1.05 | 0.1 | 0.85 | 0.31 |
| | V31L | | | | | | |
| | S65N | | | | | | |
| | D71S | | | | | | |
| | D83A | | | | | | |
| | V84K | | | | | | |
| t876914 | E17N | 0.84 | 0.05 | 1.09 | 0.09 | 0.77 | 0.58 |
| | A18D | | | | | | |
| | V31L | | | | | | |
| | V66Y | | | | | | |
| | D71E | | | | | | |
| | D83A | | | | | | |
| | V84F | | | | | | |
| t876778 | D13R | 0.89 | 0.05 | 1.15 | 0.08 | 0.77 | 0.62 |
| | A18D | | | | | | |
| | N29S | | | | | | |
| | E64D | | | | | | |
| | Q70L | | | | | | |
| | D71Q | | | | | | |
| | G80A | | | | | | |
| | D83K | | | | | | |
| | V84K | | | | | | |
| t876917 | D13R | 0.95 | 0.13 | 1.14 | 0.06 | 0.83 | 2.04 |
| | A18D | | | | | | |
| | T26R | | | | | | |
| | N29S | | | | | | |
| | Q70L | | | | | | |
| | D71Q | | | | | | |
| | G80A | | | | | | |
| | D83K | | | | | | |
| t877507 | D13R | 0.93 | 0.08 | 1.11 | 0.09 | 0.84 | 0.89 |
| | E17N | | | | | | |
| | A18D | | | | | | |
| | V31L | | | | | | |
| | D71S | | | | | | |
| | D83K | | | | | | |
| | V84F | | | | | | |
| t877039 | E17N | 0.78 | 0.07 | 0.82 | 0.05 | 0.95 | 1.52 |
| | A18D | | | | | | |
| | V31L | | | | | | |
| | E64D | | | | | | |
| | D71S | | | | | | |
| | D83A | | | | | | |
| | V84K | | | | | | |
| t876904 | D13R | 0.9 | 0.08 | 1.17 | 0.08 | 0.77 | 1.04 |
| | A18D | | | | | | |
| | N29S | | | | | | |
| | Q70L | | | | | | |
| | D71E | | | | | | |
| | G80A | | | | | | |
| | D83K | | | | | | |
| t877615 | E17N | 1.06 | 0.08 | 1.4 | 0.54 | 0.75 | 0.14 |
| | T26R | | | | | | |
| | V31L | | | | | | |
| | D71S | | | | | | |
| | D83K | | | | | | |
| | V84F | | | | | | |
| t877061 | E17N | 0.96 | 0.06 | 1.01 | 0.1 | 0.95 | 0.6 |
| | A18D | | | | | | |
| | V31L | | | | | | |
| | D71S | | | | | | |
| | D83E | | | | | | |
| | V84F | | | | | | |
| | T98K | | | | | | |
| t876840 | D13R | 0.95 | 0.04 | 1.26 | 0.08 | 0.76 | 0.49 |
| | A18D | | | | | | |
| | N29S | | | | | | |
| | Q70L | | | | | | |
| | D71Q | | | | | | |
| | G80A | | | | | | |
| | D83K | | | | | | |
| | V84K | | | | | | |
| | Y85F | | | | | | |
| t877471 | E17N | 0.85 | 0.57 | 0.77 | 0.52 | 1.1 | 1.1 |
| | V31L | | | | | | |
| | D71S | | | | | | |
| | D83E | | | | | | |
| | V84F | | | | | | |
| | T98K | | | | | | |
| t876815 | V84K | 0.82 | 0.07 | 0.88 | 0.08 | 0.94 | 0.9 |
| | D39G | | | | | | |
| | D83E | | | | | | |
| | D13R | | | | | | |
| | E64D | | | | | | |
| | S65N | | | | | | |
| t877080 | E17N | 0.57 | 0.66 | 0.63 | 0.73 | 0.9 | 0.91 |
| | A18D | | | | | | |
| | V31L | | | | | | |
| | E64D | | | | | | |
| | D71S | | | | | | |
| | D83K | | | | | | |
| | V84F | | | | | | |
| t877383 | D13R | 0.62 | 0.03 | 1.76 | 0.13 | 0.35 | 0.24 |
| | A18D | | | | | | |
| | T26R | | | | | | |
| | E52H | | | | | | |
| | Y55F | | | | | | |
| | E64D | | | | | | |
| | Q70A | | | | | | |
| | G80A | | | | | | |
| | D83N | | | | | | |
| | V84K | | | | | | |
| t876802 | A18D | 0.88 | 0.12 | 0.94 | 0.08 | 0.93 | 1.39 |
| | T26R | | | | | | |
| | E52H | | | | | | |
| | Y55F | | | | | | |
| | Q70A | | | | | | |
| | G80A | | | | | | |
| | D83E | | | | | | |
| | V84K | | | | | | |
| | T98Y | | | | | | |
| t877150 | A18D | 1.16 | 0.03 | 1.3 | 0.05 | 0.89 | 0.64 |
| | T26R | | | | | | |
| | I33R | | | | | | |
| | D39G | | | | | | |
| | E52H | | | | | | |
| | Y55F | | | | | | |
| | S65N | | | | | | |
| | Q70A | | | | | | |
| | G80A | | | | | | |
| | D83N | | | | | | |
| | V84K | | | | | | |
| t877662 | A18D | 0.88 | 0.03 | 1.03 | 0.03 | 0.86 | 0.98 |
| | T26R | | | | | | |
| | E52H | | | | | | |
| | Y55F | | | | | | |
| | E64D | | | | | | |
| | Q70A | | | | | | |
| | G80A | | | | | | |
| | D83N | | | | | | |
| | V84K | | | | | | |
| | T98K | | | | | | |
| t877593 | D13R | 1.06 | 0.05 | 1.45 | 0.06 | 0.73 | 0.82 |
| | A18D | | | | | | |
| | N29S | | | | | | |
| | Q70L | | | | | | |
| | D71Q | | | | | | |
| | G80A | | | | | | |
| | D83E | | | | | | |
| t877319 | E17N | 1.06 | 0.29 | 0.99 | 0.35 | 1.08 | 0.84 |
| | A18D | | | | | | |
| | V31L | | | | | | |
| | D71S | | | | | | |
| | D83A | | | | | | |
| | V84F | | | | | | |
| t877010 | D13R | 0.93 | 0.03 | 1.02 | 0.09 | 0.91 | 0.3 |
| | A18D | | | | | | |
| | N29S | | | | | | |
| | E64D | | | | | | |
| | S65N | | | | | | |
| | Q70L | | | | | | |
| | D71Q | | | | | | |
| | G80A | | | | | | |
| | D83K | | | | | | |
| t876911 | E17N | 0.81 | 0.05 | 0.89 | 0.07 | 0.91 | 0.67 |
| | A18D | | | | | | |
| | V31L | | | | | | |
| | D71S | | | | | | |
| | D83K | | | | | | |
| | V84K | | | | | | |
| t876790 | E17N | 0.79 | 0.03 | 0.87 | 0.08 | 0.91 | 0.35 |
| | V31L | | | | | | |
| | I33N | | | | | | |
| | V66Y | | | | | | |
| | D71S | | | | | | |
| | G82R | | | | | | |
| | V84F | | | | | | |
| t877352 | A18D | 0.6 | 0.03 | 1.74 | 0.2 | 0.34 | 0.17 |
| | T26R | | | | | | |
| | I33R | | | | | | |
| | E52H | | | | | | |
| | Y55F | | | | | | |
| | E64D | | | | | | |
| | Q70A | | | | | | |
| | G80A | | | | | | |
| | D83N | | | | | | |
| | V84K | | | | | | |
| | T98K | | | | | | |
| t876781 | A18D | 0.88 | 0.05 | 0.99 | 0.06 | 0.89 | 0.84 |
| | E22K | | | | | | |
| | T26R | | | | | | |
| | E52H | | | | | | |
| | Y55F | | | | | | |
| | Q70A | | | | | | |
| | G80A | | | | | | |
| | D83N | | | | | | |
| | V84K | | | | | | |
| t877581 | T26R | 0.82 | 0.01 | 1.05 | 0.06 | 0.79 | 0.21 |
| | I33H | | | | | | |
| | Y55F | | | | | | |
| | E64D | | | | | | |
| | Q70A | | | | | | |
| | G80A | | | | | | |
| | D83K | | | | | | |
| | T98K | | | | | | |
| t877387 | A18D | 0.6 | 0.03 | 1.77 | 0.22 | 0.34 | 0.14 |
| | T26R | | | | | | |
| | I33R | | | | | | |
| | E52H | | | | | | |
| | Y55F | | | | | | |
| | Q70A | | | | | | |
| | G80A | | | | | | |
| | D83E | | | | | | |
| | V84K | | | | | | |
| | T98Y | | | | | | |
| t877062 | D13R | 0.99 | 0.09 | 1.11 | 0.13 | 0.89 | 0.73 |
| | A18D | | | | | | |
| | T26R | | | | | | |
| | N29S | | | | | | |
| | Q70L | | | | | | |
| | D71Q | | | | | | |
| | G80A | | | | | | |
| | D83K | | | | | | |
| | T98K | | | | | | |
| t877397 | D13R | 0.63 | 0.11 | 1.9 | 0.15 | 0.33 | 0.76 |
| | A18D | | | | | | |
| | N29S | | | | | | |
| | Q70L | | | | | | |
| | D71Q | | | | | | |
| | G80A | | | | | | |
| | D83K | | | | | | |
| | V84K | | | | | | |
| t877031 | D13R | 0.97 | 0.04 | 1.11 | 0.1 | 0.88 | 0.44 |
| | A18D | | | | | | |
| | T26R | | | | | | |
| | N29S | | | | | | |
| | E64D | | | | | | |
| | Q70L | | | | | | |
| | D71Q | | | | | | |
| | G80A | | | | | | |
| | D83K | | | | | | |
| t877343 | T26R | 1.16 | 0.03 | 1.13 | 0.09 | 1.03 | 0.27 |
| | D83E | | | | | | |
| | D13R | | | | | | |
| | E64D | | | | | | |
| | T98K | | | | | | |
| | S65N | | | | | | |
| t877356 | A18D | 0.57 | 0.05 | 1.74 | 0.13 | 0.33 | 0.38 |
| | T26R | | | | | | |
| | I33H | | | | | | |
| | G80A | | | | | | |
| t877374 | D13R | 1 | 0.07 | 0.96 | 0.19 | 1.04 | 0.38 |
| | A18D | | | | | | |
| | Y55F | | | | | | |
| | N29S | | | | | | |
| | Q70L | | | | | | |
| | G80A | | | | | | |
| | D83E | | | | | | |
| | T98K | | | | | | |
| | Q70A | | | | | | |
| t877063 | E17N | 0.82 | 0.09 | 0.95 | 0.05 | 0.87 | 1.65 |
| | A18D | | | | | | |
| | T26R | | | | | | |
| | V31L | | | | | | |
| | D71S | | | | | | |
| | D83K | | | | | | |
| | V84F | | | | | | |
| t877414 | E17N | 0.93 | 0.05 | 0.9 | 0.1 | 1.04 | 0.52 |
| | V31L | | | | | | |
| | D71S | | | | | | |
| | D83K | | | | | | |
| | V84F | | | | | | |
| | T98K | | | | | | |
| | D83K | | | | | | |
| t876776 | E17N | 0.84 | 0.03 | 0.97 | 0.08 | 0.87 | 0.32 |
| | A18D | | | | | | |
| | V31L | | | | | | |
| | I33N | | | | | | |
| | D71S | | | | | | |
| | V84F | | | | | | |
| | T98K | | | | | | |
| t877180 | E17N | 0.91 | 0.06 | 1.09 | 0.04 | 0.83 | 1.61 |
| | V31L | | | | | | |
| | I33N | | | | | | |
| | E64D | | | | | | |
| | D71S | | | | | | |
| | V84K | | | | | | |
| t877503 | A18D | 0.88 | 0.01 | 1.17 | 0.06 | 0.75 | 0.24 |
| | T26R | | | | | | |
| | E52H | | | | | | |
| | Y55F | | | | | | |
| | S65N | | | | | | |
| | Q70A | | | | | | |
| | G80A | | | | | | |
| | D83N | | | | | | |
| | V84K | | | | | | |
| | T98Y | | | | | | |
| t877566 | A18D | 1.02 | 0.07 | 1.5 | 0.05 | 0.68 | 1.33 |
| | T26R | | | | | | |
| | E52H | | | | | | |
| | Y55F | | | | | | |
| | Q70A | | | | | | |
| | G80A | | | | | | |
| | D83K | | | | | | |
| | V84K | | | | | | |
| | Y85F | | | | | | |
| t877349 | E17N | 1.08 | 0.06 | 1.07 | 0.01 | 1 | 5.11 |
| | A18D | | | | | | |
| | V31L | | | | | | |
| | D71S | | | | | | |
| | D83A | | | | | | |
| | V84K | | | | | | |
| t877246 | T26R | 0.92 | 0.1 | 1.12 | 0.1 | 0.83 | 0.93 |
| | I33H | | | | | | |
| | Y55F | | | | | | |
| | Q70A | | | | | | |
| | G80A | | | | | | |
| | D83E | | | | | | |
| | V84K | | | | | | |
| | Y85A | | | | | | |
| t877626 | A18D | 0.83 | 0.05 | 1.11 | 0. 1 | 0.75 | 0.5 |
| | T26R | | | | | | |
| | I33R | | | | | | |
| | D39G | | | | | | |
| | E52H | | | | | | |
| | Y55F | | | | | | |
| | Q70A | | | | | | |
| | G80A | | | | | | |
| | D83K | | | | | | |
| | V84K | | | | | | |
| t877614 | D13R | 0.92 | 0.09 | 1.17 | 0.09 | 0.78 | 0.95 |
| | A18D | | | | | | |
| | N29S | | | | | | |
| | S65N | | | | | | |
| | Q70L | | | | | | |
| | D71Q | | | | | | |
| | G80A | | | | | | |
| | D83K | | | | | | |
| | V84K | | | | | | |
| t877511 | D13R | 0.86 | 0.03 | 1.1 | 0.12 | 0.78 | 0.23 |
| | A18D | | | | | | |
| | N29S | | | | | | |
| | Q70L | | | | | | |
| | G80A | | | | | | |
| | D83K | | | | | | |
| t877705 | D13R | 0.91 | 0.02 | 1.18 | 0.07 | 0.78 | 0.23 |
| | A18D | | | | | | |
| | T26R | | | | | | |
| | E52H | | | | | | |
| | Y55F | | | | | | |
| | S65N | | | | | | |
| | Q70A | | | | | | |
| | G80A | | | | | | |
| | D83N | | | | | | |
| | V84K | | | | | | |
| t877681 | D13R | 1.11 | 0.06 | 1.68 | 0.1 | 0.66 | 0.64 |
| | A18D | | | | | | |
| | N29S | | | | | | |
| | Q70L | | | | | | |
| | D71Q | | | | | | |
| | G80A | | | | | | |
| | D83K | | | | | | |
| | T98Y | | | | | | |
| t876883 | T26R | 0.79 | 0.12 | 0.95 | 0.12 | 0.82 | 1 |
| | I33H | | | | | | |
| | Y55F | | | | | | |
| | Q70A | | | | | | |
| | I74G | | | | | | |
| | G80A | | | | | | |
| | D83K | | | | | | |
| | V84K | | | | | | |
| | Y85A | | | | | | |
| t876821 | T26R | 0.81 | 0.08 | 1.14 | 0.08 | 0.71 | 1.01 |
| | I33H | | | | | | |
| | Y55F | | | | | | |
| | Q70A | | | | | | |
| | G80A | | | | | | |
| | D83K | | | | | | |
| | V84K | | | | | | |
| | Y85A | | | | | | |
| | T98Y | | | | | | |
| t877125 | D13R | 0.95 | 0.37 | 0.99 | 0.31 | 0.96 | 1.19 |
| | A18D | | | | | | |
| | N29S | | | | | | |
| | Q70L | | | | | | |
| | D71Q | | | | | | |
| | G80A | | | | | | |
| | D83E | | | | | | |
| | T98Y | | | | | | |
| t876760 | D13R | 1.05 | 0.1 | 1.53 | 0.07 | 0.69 | 1.4 |
| | A18D | | | | | | |
| | N29S | | | | | | |
| | S65N | | | | | | |
| | Q70L | | | | | | |
| | D71Q | | | | | | |
| | G80A | | | | | | |
| | D83K | | | | | | |
| | T98K | | | | | | |
| t877110 | E17N | 0.94 | 0.09 | 1.26 | 0.11 | 0.75 | 0.76 |
| | V31L | | | | | | |
| | D71S | | | | | | |
| | D83K | | | | | | |
| | V84F | | | | | | |
| | T98Y | | | | | | |
| t877325 | A18D | 0.59 | 0.05 | 2.03 | 0.1 | 0.29 | 0.48 |
| | T26R | | | | | | |
| | E52H | | | | | | |
| | Y55F | | | | | | |
| | V61S | | | | | | |
| | Q70A | | | | | | |
| | G80A | | | | | | |
| | D83N | | | | | | |
| | V84K | | | | | | |
| | Y85F | | | | | | |
| t877026 | T26R | 0.77 | 0.03 | 1 | 0.06 | 0.77 | 0.44 |
| | I33H | | | | | | |
| | Y55F | | | | | | |
| | S65N | | | | | | |
| | Q70A | | | | | | |
| | I74G | | | | | | |
| | G80A | | | | | | |
| | D83K | | | | | | |
| | Y85A | | | | | | |
| t877654 | D13R | 0.86 | 0.04 | 1.28 | 0.04 | 0.67 | 0.89 |
| | A18D | | | | | | |
| | N29S | | | | | | |
| | Q70L | | | | | | |
| | D71Q | | | | | | |
| | G80A | | | | | | |
| | D83K | | | | | | |
| | V84K | | | | | | |
| | T98Y | | | | | | |
| t877683 | T26R | 0.91 | 0.05 | 1.5 | 0.16 | 0.6 | 0.31 |
| | I33H | | | | | | |
| | Y55F | | | | | | |
| | E64D | | | | | | |
| | Q70A | | | | | | |
| | G80A | | | | | | |
| | D83E | | | | | | |
| | Y85A | | | | | | |
| t877152 | E17N | 0.84 | 0.08 | 1.14 | 0.12 | 0.74 | 0.64 |
| | V31L | | | | | | |
| | I33N | | | | | | |
| | E64D | | | | | | |
| | D71S | | | | | | |
| | V84F | | | | | | |
| | T98Y | | | | | | |
| t877013 | T26R | 0.88 | 0.05 | 1.35 | 0.13 | 0.65 | 0.41 |
| | I33H | | | | | | |
| | Y55F | | | | | | |
| | E64D | | | | | | |
| | Q70A | | | | | | |
| | G80A | | | | | | |
| | D83K | | | | | | |
| | Y85A | | | | | | |
| t877459 | A18D | 0.93 | 0.33 | 1.05 | 0.3 | 0.89 | 1.11 |
| | T26R | | | | | | |
| | I33N | | | | | | |
| | E52H | | | | | | |
| | Y55F | | | | | | |
| | Q70A | | | | | | |
| | D71S | | | | | | |
| | G80A | | | | | | |
| | D83N | | | | | | |
| | V84K | | | | | | |
| t877360 | A18D | 0.61 | 0.06 | 2.18 | 0.16 | 0.28 | 0.36 |
| | T26R | | | | | | |
| | I33H | | | | | | |
| | Y55F | | | | | | |
| | E64D | | | | | | |
| | Q70A | | | | | | |
| | G80A | | | | | | |
| | D83K | | | | | | |
| | Y85A | | | | | | |
| t877323 | T26R | 0.58 | 0.03 | 2.1 | 0.05 | 0.28 | 0.58 |
| | I33H | | | | | | |
| | Y55F | | | | | | |
| | E64D | | | | | | |
| | S65N | | | | | | |
| | Q70A | | | | | | |
| | G80A | | | | | | |
| | D83K | | | | | | |
| t877700 | D13R | 0.87 | 0.02 | 1.36 | 0.06 | 0.64 | 0.27 |
| | A18D | | | | | | |
| | N29S | | | | | | |
| | V66Y | | | | | | |
| | Q70L | | | | | | |
| | G80A | | | | | | |
| | D83K | | | | | | |
| | Y85F | | | | | | |
| t877114 | E17N | 0.93 | 0.12 | 1.32 | 0.17 | 0.7 | 0.71 |
| | A18D | | | | | | |
| | V31L | | | | | | |
| | V66Y | | | | | | |
| | D71S | | | | | | |
| | D83A | | | | | | |
| | V84F | | | | | | |
| | Y85F | | | | | | |
| t877743 | D13R | 0.86 | 0.05 | 1.35 | 0.08 | 0.64 | 0.65 |
| | A18D | | | | | | |
| | E22K | | | | | | |
| | N29S | | | | | | |
| | V66Y | | | | | | |
| | Q70L | | | | | | |
| | G80A | | | | | | |
| | D83K | | | | | | |
| t876903 | D71E | 0.76 | 0.05 | 1.06 | 0.06 | 0.72 | 0.84 |
| | V66Y | | | | | | |
| | V61S | | | | | | |
| | E22K | | | | | | |
| | D83K | | | | | | |
| | T98K | | | | | | |
| t877509 | T26R | 0.93 | 0.09 | 1.4 | 0.1 | 0.66 | 0.93 |
| | I33H | | | | | | |
| | Y55F | | | | | | |
| | Q70A | | | | | | |
| | G80A | | | | | | |
| | D83K | | | | | | |
| | Y85A | | | | | | |
| t877072 | E17N | 0.91 | 0.29 | 1.33 | 0.52 | 0.68 | 0.56 |
| | A18D | | | | | | |
| | V31L | | | | | | |
| | D71S | | | | | | |
| | D83K | | | | | | |
| | V84F | | | | | | |
| | T98Y | | | | | | |
| t877078 | A18D | 0.97 | 0.07 | 1.42 | 0.06 | 0.68 | 1.13 |
| | T26R | | | | | | |
| | D.39G | | | | | | |
| | E52H | | | | | | |
| | Y55F | | | | | | |
| | E64D | | | | | | |
| | Q70A | | | | | | |
| | G80A | | | | | | |
| | D83N | | | | | | |
| | V84K | | | | | | |
| t877167 | E17N | 0.73 | 0.49 | 0.87 | 0.03 | 0.85 | 14.1 |
| | V31L | | | | | | |
| | D71S | | | | | | |
| | D83A | | | | | | |
| | V84K | | | | | | |
| | Y85F | | | | | | |
| t877275 | D13R | 0.99 | 0.05 | 1.17 | 0.7 | 0.84 | 0.08 |
| | A18D | | | | | | |
| | N29S | | | | | | |
| | S65N | | | | | | |
| | Q70L | | | | | | |
| | I74G | | | | | | |
| | G80A | | | | | | |
| | D83K | | | | | | |
| t877055 | A18D | 0.96 | 0.3 | 1.42 | 0.62 | 0.68 | 0.48 |
| | T26R | | | | | | |
| | E52H | | | | | | |
| | Y55F | | | | | | |
| | Q70A | | | | | | |
| | G80A | | | | | | |
| | D83N | | | | | | |
| | V84K | | | | | | |
| | F88N | | | | | | |
| | T98K | | | | | | |
| t877316 | T26R | 0.99 | 0.4 | 1.37 | 0.44 | 0.72 | 0.92 |
| | I33H | | | | | | |
| | Y55F | | | | | | |
| | Q70A | | | | | | |
| | G80A | | | | | | |
| | D83K | | | | | | |
| | Y85A | | | | | | |
| t876939 | D13R | 0.83 | 0.08 | 1.31 | 0.14 | 0.63 | 0.59 |
| | A18D | | | | | | |
| | N29S | | | | | | |
| | Q70L | | | | | | |
| | G80A | | | | | | |
| | D83K | | | | | | |
| | V84K | | | | | | |
| | T98K | | | | | | |
| t877447 | T26R | 0.58 | 0.03 | 2.42 | 0.18 | 0.24 | 0.16 |
| | I33H | | | | | | |
| | Y55F | | | | | | |
| | S65N | | | | | | |
| | Q70A | | | | | | |
| | G80A | | | | | | |
| | D83E | | | | | | |
| | Y85A | | | | | | |
| t877364 | A18D | 0.58 | 0.03 | 2.47 | 0.2 | 0.23 | 0.13 |
| | T26R | | | | | | |
| | I33H | | | | | | |
| | Y55F | | | | | | |
| | S65N | | | | | | |
| | Q70A | | | | | | |
| | G80A | | | | | | |
| | D83K | | | | | | |
| | Y85A | | | | | | |
| t877321 | D13R | 0.58 | 0.03 | 2.76 | 0.3 | 0.21 | 0.09 |
| | A18D | | | | | | |
| | N29S | | | | | | |
| | D39G | | | | | | |
| | Q70L | | | | | | |
| | G80A | | | | | | |
| | D83K | | | | | | |
| | Y85F | | | | | | |
| t877292 | D13R | 0.62 | 0.03 | 2.95 | 0.38 | 0.21 | 0.09 |
| | A18D | | | | | | |
| | N29S | | | | | | |
| | D39G | | | | | | |
| | S65N | | | | | | |
| | Q70L | | | | | | |
| | D71Q | | | | | | |
| | G80A | | | | | | |
| | D83K | | | | | | |
| t877294 | T26R | 0.83 | 0.47 | 1.43 | 0.6 | 0.58 | 0.78 |
| | I33H | | | | | | |
| | Y55F | | | | | | |
| | Q70A | | | | | | |
| | G80A | | | | | | |
| | D83K | | | | | | |
| t877230 | E17N | 0.69 | 0.36 | 1.39 | 0.63 | 0.5 | 0.56 |
| | E22K | | | | | | |
| | V31L | | | | | | |
| | D71E | | | | | | |
| | D83A | | | | | | |
| | V84F | | | | | | |
| t782404 | | 0.54 | 0.3 | 1.83 | 0.71 | 0.3 | 0.42 |
| t877481 | E17N | 0.01 | 0.01 | 0.57 | 1.15 | 0.01 | 0.01 |
| | V31L | | | | | | |
| | E64D | | | | | | |
| | D71S | | | | | | |
| | D83A | | | | | | |
| | V84K | | | | | | |
| t877455 | D71E | 0.01 | 0.01 | 0.55 | 1 1 | 0.01 | 0.01 |
| | V66Y | | | | | | |
| | E22K | | | | | | |
| | G82R | | | | | | |
| | T98K | | | | | | |
| | D13R | | | | | | |
| t877023 | D13R | 0 | 0 | 0.74 | 1.47 | 0 | 0 |
| | E17N | | | | | | |
| | A18D | | | | | | |
| | V31L | | | | | | |
| | I33N | | | | | | |
| | D71S | | | | | | |
| | V84K | | | | | | |
| t877057 | E17N | 0 | 0 | 0.68 | 1.36 | 0 | 0 |
| | V31L | | | | | | |
| | I33N | | | | | | |
| | D71S | | | | | | |
| | D83E | | | | | | |
| | V84K | | | | | | |

TABLE 10*
Non-limiting examples of OAC amino acid
substitutions relative to SEQ ID NO: 1

| Position | | | | | | | | |
|---|---|---|---|---|---|---|---|---|
| in SEQ | | | | | | | | |
| ID NO: | | | | | | | | |
| 1 | Amino acid substitutions | | | | | | | |
| 2 | A2G | | | | | | | |
| 3 | V3M | V3Y | | | | | | |
| 13 | D13R | D13K | | | | | | |
| 17 | E17N | | | | | | | |
| 18 | A18D | A18R | | | | | | |
| 19 | Q19E | Q19D | | | | | | |
| 20 | K20A | | | | | | | |
| 21 | E21K | | | | | | | |
| 22 | E22T | E22K | | | | | | |
| 24 | F24M | | | | | | | |
| 25 | K25A | K25N | | | | | | |
| 26 | T26H | T26R | T26A | T26E | | | | |
| 28 | V28A | V28S | V28E | V28H | | | | |
| 29 | N29D | N29S | N29E | N29T | | | | |
| 31 | V31L | V31A | | | | | | |
| 33 | I33H | I33R | I33D | I33E | I33K | I33Q | I33N | |
| 37 | M37L | | | | | | | |
| 38 | K38L | | | | | | | |
| 39 | D39G | D39S | D39Q | | | | | |
| 41 | Y41K | Y41R | | | | | | |
| 45 | D45I | | | | | | | |
| 46 | V46F | | | | | | | |
| 48 | Q48A | | | | | | | |
| 49 | K49Q | | | | | | | |
| 50 | N50K | N50F | N50W | | | | | |
| 52 | E52H | | | | | | | |
| 53 | E53H | | | | | | | |
| 55 | Y55F | | | | | | | |
| 56 | T56Y | | | | | | | |
| 57 | H57Y | | | | | | | |
| 59 | V59I | V59F | | | | | | |
| 60 | E601 | E60L | | | | | | |
| 61 | V61T | V61D | V61S | | | | | |
| 62 | T62M | | | | | | | |
| 64 | E64Q | E64D | | | | | | |
| 65 | S65N | | | | | | | |
| 66 | V66L | V66M | V66Y | | | | | |
| 67 | E67K | | | | | | | |
| 68 | T68E | T68G | T68H | | | | | |
| 69 | I69L | I69Y | | | | | | |
| 70 | Q70A | Q70L | | | | | | |
| 71 | D71Q | D71S | D71E | | | | | |
| 73 | I73L | | | | | | | |
| 74 | I74D | I74E | I74H | I74Q | I74S | I74G | I74L | |
| 80 | G80V | G80A | G80E | G80S | G80D | G80N | | |
| 81 | F81Y | | | | | | | |
| 82 | G82K | G82V | G82R | | | | | |
| 83 | D83A | D83E | D83G | D83K | D83N | D83Q | D83R | D83S |
| 84 | V84F | V84K | V84M | V84Q | | | | |
| 85 | Y85A | Y85F | | | | | | |
| 86 | R86N | R86G | R86S | | | | | |
| 87 | S87C | S87D | S87K | | | | | |
| 88 | F88Y | F88N | F88S | | | | | |
| 89 | W89V | W89M | | | | | | |
| 94 | I94V | | | | | | | |
| 95 | F95M | F95I | | | | | | |
| 97 | Y97F | | | | | | | |
| 98 | T98E | T98K | T98Y | | | | | |
| 100 | R100A | R100G | R100K | R100N | R100Q | R100S | | |
| 101 | K101A | K101E | | | | | | |

*Non-conservative amino acid substitutions are indicated in bold font and are underlined.

TABLE 11
Amino acid and nucleic acid sequences of OACs

| | Amino Acid | Nucleic acid |
|---|---|---|
| Strain | SEQ ID NO | SEQ ID NO |
| t618874 | 19 | 107 |
| t618875 | 20 | 108 |
| t618876 | 21 | 109 |
| t618877 | 22 | 110 |
| t618878 | 23 | 111 |
| t618879 | 24 | 112 |
| t618880 | 25 | 113 |
| t618881 | 26 | 114 |
| t618882 | 27 | 115 |
| t618883 | 28 | 116 |
| t618884 | 2 | 117 |
| t618885 | 30 | 118 |
| t618886 | 31 | 119 |
| t618887 | 32 | 120 |
| t618888 | 33 | 121 |
| t618889 | 34 | 122 |
| t618890 | 35 | 123 |
| t618891 | 36 | 124 |
| t618892 | 37 | 125 |
| t618893 | 38 | 126 |
| t618894 | 39 | 127 |
| t618895 | 40 | 128 |
| t618896 | 41 | 129 |
| t618897 | 42 | 130 |
| t618898 | 43 | 131 |
| t618899 | 44 | 132 |
| t618900 | 45 | 133 |
| t618901 | 46 | 134 |
| t618902 | 47 | 135 |
| t618903 | 18 | 136 |
| t618904 | 49 | 137 |
| t618905 | 50 | 138 |
| t618906 | 51 | 139 |
| t618907 | 52 | 140 |
| t618908 | 53 | 141 |
| t618909 | 54 | 142 |
| t618910 | 55 | 143 |
| t618911 | 56 | 144 |
| t618912 | 57 | 145 |
| t618913 | 58 | 146 |
| t618914 | 59 | 147 |
| t618915 | 60 | 148 |
| t621323 | 61 | 149 |
| t621324 | 62 | 150 |
| t621325 | 63 | 151 |
| t621326 | 64 | 152 |
| t703752 | 65 | 153 |
| t703753 | 66 | 154 |
| t703754 | 67 | 155 |
| t703755 | 68 | 156 |
| t703756 | 69 | 157 |
| t733419 | 70 | 158 |
| t733420 | 71 | 159 |
| t733421 | 72 | 160 |
| t733422 | 73 | 161 |
| t733423 | 74 | 162 |
| t733424 | 75 | 163 |
| t733426 | 76 | 164 |
| t733427 | 77 | 165 |
| t733428 | 78 | 166 |
| t733429 | 79 | 167 |
| t733430 | 80 | 168 |
| t733431 | 81 | 169 |
| t733432 | 82 | 170 |
| t733433 | 83 | 171 |
| t733434 | 84 | 172 |
| t733435 | 85 | 173 |
| t733436 | 86 | 174 |
| t733437 | 87 | 175 |
| t733438 | 88 | 176 |
| t733439 | 89 | 177 |
| t733440 | 90 | 178 |
| t733441 | 91 | 179 |
| t733442 | 92 | 180 |
| t733443 | 93 | 181 |
| t733444 | 94 | 182 |
| t733445 | 95 | 183 |
| t733446 | 96 | 184 |
| t733447 | 97 | 185 |
| t733448 | 98 | 186 |
| t733449 | 99 | 187 |
| t733450 | 100 | 188 |
| t733451 | 101 | 189 |
| t733452 | 102 | 190 |
| t733453 | 103 | 191 |
| t733454 | 104 | 192 |
| t733455 | 105 | 193 |
| t733456 | 106 | 194 |
| t815827 | 196 | 389 |
| t815828 | 197 | 390 |
| t815829 | 198 | 391 |
| t815830 | 199 | 392 |
| t815831 | 200 | 393 |
| t815832 | 201 | 394 |
| t815833 | 202 | 395 |
| t815834 | 203 | 396 |
| t815835 | 204 | 397 |
| t815836 | 205 | 398 |
| t815837 | 206 | 399 |
| t815838 | 207 | 400 |
| t815840 | 208 | 401 |
| t815841 | 209 | 402 |
| t815842 | 210 | 403 |
| t815843 | 211 | 404 |
| t815844 | 212 | 405 |
| t815846 | 213 | 406 |
| t815847 | 214 | 407 |
| t815849 | 215 | 408 |
| t815850 | 216 | 409 |
| t815851 | 217 | 410 |
| t815852 | 218 | 411 |
| t815853 | 219 | 412 |
| t815854 | 220 | 413 |
| t815855 | 221 | 414 |
| t815857 | 222 | 415 |
| t815858 | 223 | 416 |
| t815859 | 224 | 417 |
| t815860 | 225 | 418 |
| t815861 | 226 | 419 |
| t815863 | 227 | 420 |
| t815864 | 228 | 421 |
| t815865 | 229 | 422 |
| t815866 | 230 | 423 |
| t815867 | 231 | 424 |
| t815868 | 232 | 425 |
| t815869 | 233 | 426 |
| t815871 | 234 | 427 |
| t815872 | 235 | 428 |
| t815874 | 236 | 429 |
| t815875 | 237 | 430 |
| t815878 | 238 | 431 |
| t815879 | 239 | 432 |
| t815880 | 240 | 433 |
| t815882 | 241 | 434 |
| t815886 | 242 | 435 |
| t815888 | 243 | 436 |
| t815889 | 244 | 437 |
| t815890 | 245 | 438 |
| t815891 | 246 | 439 |
| t815892 | 247 | 440 |
| t815893 | 248 | 441 |
| t815894 | 249 | 442 |
| t815895 | 250 | 443 |
| t815896 | 251 | 444 |
| t815897 | 252 | 445 |
| t815898 | 253 | 446 |
| t815899 | 254 | 447 |
| t815900 | 255 | 448 |
| t815901 | 256 | 449 |
| t815902 | 257 | 450 |
| t815903 | 258 | 451 |
| t815904 | 259 | 452 |
| t815905 | 260 | 453 |
| t815906 | 261 | 454 |
| t815907 | 262 | 455 |
| t815909 | 263 | 456 |
| t815910 | 264 | 457 |
| t813741 | 265 | 458 |
| t814031 | 266 | 459 |
| t814033 | 267 | 460 |
| t814036 | 268 | 461 |
| t814044 | 269 | 462 |
| t814047 | 270 | 463 |
| t814049 | 271 | 464 |
| t814050 | 272 | 465 |
| t814054 | 273 | 466 |
| t814057 | 274 | 467 |
| t814062 | 275 | 468 |
| t814063 | 276 | 469 |
| t814064 | 277 | 470 |
| t814066 | 278 | 471 |
| t814069 | 279 | 472 |
| t814073 | 280 | 473 |
| t814075 | 281 | 474 |
| t814078 | 282 | 475 |
| t814086 | 283 | 476 |
| t814090 | 284 | 477 |
| t814099 | 285 | 478 |
| t814103 | 286 | 479 |
| t814109 | 287 | 480 |
| t814110 | 288 | 481 |
| t814112 | 289 | 482 |
| t814116 | 290 | 483 |
| t814118 | 291 | 484 |
| t814119 | 292 | 485 |
| t814120 | 293 | 486 |
| t814121 | 294 | 487 |
| t814122 | 295 | 488 |
| t814125 | 296 | 489 |
| t814127 | 297 | 490 |
| t814128 | 298 | 491 |
| t814129 | 299 | 492 |
| t814132 | 300 | 493 |
| t814133 | 301 | 494 |
| t814135 | 302 | 495 |
| t814136 | 303 | 496 |
| t814140 | 304 | 497 |
| t814141 | 305 | 498 |
| t814144 | 306 | 499 |
| t814148 | 307 | 500 |
| t814152 | 308 | 501 |
| t814158 | 309 | 502 |
| t814161 | 310 | 503 |
| t814166 | 311 | 504 |
| t814168 | 312 | 505 |
| t814177 | 313 | 506 |
| t814193 | 314 | 507 |
| t814194 | 315 | 508 |
| t814201 | 316 | 509 |
| t814203 | 317 | 510 |
| t814208 | 318 | 511 |
| t814209 | 319 | 512 |
| t814210 | 320 | 513 |
| t814213 | 321 | 514 |
| t814222 | 322 | 515 |
| t814225 | 323 | 516 |
| t814228 | 324 | 517 |
| t814229 | 325 | 518 |
| t814252 | 326 | 519 |
| t814254 | 327 | 520 |
| t814256 | 328 | 521 |
| t814262 | 329 | 522 |
| t814280 | 330 | 523 |
| t814296 | 331 | 524 |
| t814304 | 332 | 525 |
| t814313 | 333 | 526 |
| t814317 | 334 | 527 |
| t814323 | 335 | 528 |
| t814326 | 336 | 529 |
| t814334 | 337 | 530 |
| t814342 | 338 | 531 |
| t814347 | 339 | 532 |
| t814348 | 340 | 533 |
| t814355 | 341 | 534 |
| t814360 | 342 | 535 |
| t814363 | 343 | 536 |
| t814371 | 344 | 537 |
| t814384 | 345 | 538 |
| t814388 | 346 | 539 |
| t814390 | 347 | 540 |
| t814391 | 348 | 541 |
| t814411 | 349 | 542 |
| t814414 | 350 | 543 |
| t814416 | 351 | 544 |
| t814417 | 352 | 545 |
| t814420 | 353 | 546 |
| t814430 | 354 | 547 |
| t814431 | 355 | 548 |
| t814436 | 356 | 549 |
| t814440 | 357 | 550 |
| t814442 | 358 | 551 |
| t814450 | 359 | 552 |
| t814467 | 360 | 553 |
| t814477 | 361 | 554 |
| t814482 | 362 | 555 |
| t814483 | 363 | 556 |
| t814485 | 364 | 557 |
| t814486 | 365 | 558 |
| t814488 | 366 | 559 |
| t814490 | 367 | 560 |
| t814496 | 368 | 561 |
| t814497 | 369 | 562 |
| t814500 | 370 | 563 |
| t814504 | 371 | 564 |
| t814505 | 372 | 565 |
| t814506 | 373 | 566 |
| t814508 | 374 | 567 |
| t814510 | 375 | 568 |
| t814512 | 376 | 569 |
| t814516 | 377 | 570 |
| t814521 | 378 | 571 |
| t814526 | 379 | 572 |
| t814529 | 380 | 573 |
| t814532 | 381 | 574 |
| t814533 | 382 | 575 |
| t814537 | 383 | 576 |
| t814546 | 384 | 577 |
| t814547 | 385 | 578 |
| t814551 | 386 | 579 |
| t814573 | 387 | 580 |
| t814575 | 388 | 581 |
| t454529 | 582 | 949 |
| t442710 | 583 | 950 |
| t442707 | 584 | 951 |
| t500213 | 585 | 952 |
| t500274 | 586 | 953 |
| t500588 | 587 | 954 |
| t500192 | 588 | 955 |
| t500294 | 589 | 956 |
| t500440 | 590 | 957 |
| t500492 | 591 | 958 |
| t500544 | 592 | 959 |
| t500710 | 593 | 960 |
| t500726 | 594 | 961 |
| t500701 | 595 | 962 |
| t500269 | 596 | 963 |
| t500289 | 597 | 964 |
| t500267 | 598 | 965 |
| t500610 | 599 | 966 |
| t500693 | 600 | 967 |
| t500137 | 601 | 968 |
| t500431 | 602 | 969 |
| t500435 | 603 | 970 |
| t782395 | 604 | 971 |
| t782403 | 605 | 972 |
| t782407 | 606 | 973 |
| t782411 | 607 | 974 |
| t782415 | 608 | 975 |
| t782419 | 609 | 976 |
| t782423 | 610 | 977 |
| t782428 | 611 | 978 |
| t782405 | 612 | 979 |
| t782442 | 613 | 980 |
| t782446 | 614 | 981 |
| t782451 | 615 | 982 |
| t782459 | 616 | 983 |
| t782463 | 617 | 984 |
| t782467 | 618 | 985 |
| t782476 | 619 | 986 |
| t782480 | 620 | 987 |
| t782443 | 621 | 988 |
| t782447 | 622 | 989 |
| t782460 | 623 | 990 |
| t782464 | 624 | 991 |
| t782468 | 625 | 992 |
| t782472 | 626 | 993 |
| t782477 | 627 | 994 |
| t782481 | 628 | 995 |
| t782592 | 629 | 996 |
| t782604 | 630 | 997 |
| t782627 | 631 | 998 |
| t782589 | 632 | 999 |
| t782593 | 633 | 1000 |
| t782634 | 634 | 1001 |
| t782641 | 635 | 1002 |
| t782645 | 636 | 1003 |
| t782649 | 637 | 1004 |
| t782653 | 638 | 1005 |
| t782657 | 639 | 1006 |
| t782661 | 640 | 1007 |
| t782665 | 641 | 1008 |
| t782669 | 642 | 1009 |
| t782673 | 643 | 1010 |
| t782677 | 644 | 1011 |
| t782674 | 645 | 1012 |
| t782497 | 646 | 1013 |
| t782646 | 647 | 1014 |
| t782654 | 648 | 1015 |
| t782666 | 649 | 1016 |
| t782678 | 650 | 1017 |
| t782487 | 651 | 1018 |
| t782504 | 652 | 1019 |
| t782554 | 653 | 1020 |
| t782558 | 654 | 1021 |
| t782747 | 655 | 1022 |
| t782739 | 656 | 1023 |
| t782810 | 657 | 1024 |
| t782833 | 658 | 1025 |
| t782864 | 659 | 1026 |
| t782870 | 660 | 1027 |
| t782920 | 661 | 1028 |
| t783081 | 662 | 1029 |
| t783074 | 663 | 1030 |
| t783089 | 664 | 1031 |
| t783126 | 665 | 1032 |
| t783151 | 666 | 1033 |
| t783164 | 667 | 1034 |
| t783172 | 668 | 1035 |
| t783176 | 669 | 1036 |
| t783160 | 671 | 1038 |
| t783186 | 672 | 1039 |
| t783165 | 673 | 1040 |
| t783182 | 674 | 1041 |
| t783143 | 675 | 1042 |
| t783171 | 676 | 1043 |
| t783200 | 677 | 1044 |
| t783210 | 678 | 1045 |
| t783214 | 679 | 1046 |
| t783288 | 680 | 1047 |
| t783289 | 681 | 1048 |
| t783211 | 682 | 1049 |
| t783215 | 683 | 1050 |
| t783298 | 684 | 1051 |
| t783216 | 685 | 1052 |
| t783220 | 686 | 1053 |
| t783294 | 687 | 1054 |
| t783204 | 688 | 1055 |
| t783299 | 689 | 1056 |
| t783213 | 690 | 1057 |
| t783217 | 691 | 1058 |
| t783316 | 692 | 1059 |
| t783320 | 693 | 1060 |
| t783324 | 694 | 1061 |
| t783309 | 695 | 1062 |
| t783313 | 696 | 1063 |
| t783329 | 697 | 1064 |
| t783333 | 698 | 1065 |
| t783337 | 699 | 1066 |
| t783302 | 700 | 1067 |
| t783318 | 701 | 1068 |
| t783326 | 702 | 1069 |
| t783256 | 703 | 1070 |
| t783280 | 704 | 1071 |
| t815839 | 705 | 1072 |
| t815856 | 706 | 1073 |
| t815873 | 707 | 1074 |
| t815877 | 708 | 1075 |
| t815881 | 709 | 1076 |
| t815908 | 710 | 1077 |
| t814035 | 711 | 1078 |
| t814046 | 712 | 1079 |
| t814091 | 713 | 1080 |
| t814095 | 714 | 1081 |
| t814101 | 715 | 1082 |
| t814159 | 716 | 1083 |
| t814181 | 717 | 1084 |
| t814187 | 718 | 1085 |
| t814199 | 719 | 1086 |
| t814211 | 720 | 1087 |
| t814242 | 721 | 1088 |
| t814243 | 722 | 1089 |
| t814247 | 723 | 1090 |
| t814267 | 724 | 1091 |
| t814277 | 725 | 1092 |
| t814292 | 726 | 1093 |
| t814293 | 727 | 1094 |
| t814297 | 728 | 1095 |
| t814301 | 729 | 1096 |
| t814303 | 730 | 1097 |
| t814330 | 731 | 1098 |
| t814369 | 732 | 1099 |
| t814400 | 733 | 1100 |
| t814449 | 734 | 1101 |
| t814455 | 735 | 1102 |
| t814456 | 736 | 1103 |
| t814469 | 737 | 1104 |
| t814475 | 738 | 1105 |
| t814476 | 739 | 1106 |
| t814518 | 740 | 1107 |
| t814555 | 741 | 1108 |
| t814556 | 742 | 1109 |
| t877150 | 745 | 1112 |
| t877343 | 746 | 1113 |
| t877444 | 747 | 1114 |
| t877228 | 748 | 1115 |
| t877187 | 749 | 1116 |
| t877681 | 750 | 1117 |
| t877570 | 751 | 1118 |
| t877407 | 752 | 1119 |
| t877437 | 753 | 1120 |
| t877227 | 754 | 1121 |
| t877349 | 755 | 1122 |
| t877188 | 756 | 1123 |
| t877477 | 757 | 1124 |
| t877431 | 758 | 1125 |
| t877158 | 759 | 1126 |
| t877319 | 760 | 1127 |
| t877185 | 761 | 1128 |
| t877593 | 762 | 1129 |
| t877138 | 763 | 1130 |
| t877615 | 764 | 1131 |
| t877598 | 765 | 1132 |
| t877136 | 766 | 1133 |
| t876988 | 767 | 1134 |
| t877645 | 768 | 1135 |
| t876760 | 769 | 1136 |
| t877320 | 770 | 1137 |
| t877439 | 771 | 1138 |
| t877223 | 772 | 1139 |
| t877441 | 773 | 1140 |
| t877164 | 774 | 1141 |
| t877269 | 775 | 1142 |
| t877566 | 776 | 1143 |
| t877667 | 777 | 1144 |
| t877404 | 778 | 1145 |
| t877639 | 779 | 1146 |
| t877374 | 780 | 1147 |
| t877467 | 781 | 1148 |
| t877596 | 782 | 1149 |
| t861745 | 783 | 1150 |
| t877062 | 784 | 1151 |
| t877367 | 785 | 1152 |
| t877275 | 786 | 1153 |
| t877256 | 787 | 1154 |
| t877316 | 788 | 1155 |
| t876807 | 789 | 1156 |
| t877712 | 790 | 1157 |
| t877229 | 791 | 1158 |
| t877078 | 792 | 1159 |
| t877031 | 793 | 1160 |
| t876837 | 794 | 1161 |
| t877306 | 795 | 1162 |
| t861743 | 796 | 1163 |
| t877055 | 797 | 1164 |
| t877014 | 798 | 1165 |
| t877061 | 799 | 1166 |
| t876968 | 800 | 1167 |
| t876956 | 801 | 1168 |
| t877125 | 802 | 1169 |
| t876840 | 803 | 1170 |
| t876917 | 804 | 1171 |
| t876959 | 805 | 1172 |
| t877110 | 806 | 1173 |
| t877071 | 807 | 1174 |
| t877534 | 808 | 1175 |
| t877091 | 809 | 1176 |
| t877702 | 810 | 1177 |
| t877610 | 811 | 1178 |
| t877459 | 812 | 1179 |
| t877010 | 813 | 1180 |
| t877114 | 814 | 1181 |
| t877507 | 815 | 1182 |
| t877108 | 816 | 1183 |
| t877414 | 817 | 1184 |
| t876982 | 818 | 1185 |
| t876784 | 819 | 1186 |
| t877509 | 820 | 1187 |
| t877246 | 821 | 1188 |
| t877510 | 822 | 1189 |
| t877616 | 823 | 1190 |
| t876990 | 824 | 1191 |
| t877056 | 825 | 1192 |
| t877614 | 826 | 1193 |
| t876933 | 827 | 1194 |
| t876938 | 828 | 1195 |
| t876987 | 829 | 1196 |
| t877578 | 830 | 1197 |
| t877705 | 831 | 1198 |
| t877100 | 832 | 1199 |
| t877620 | 833 | 1200 |
| t877072 | 834 | 1201 |
| t877021 | 835 | 1202 |
| t877501 | 836 | 1203 |
| t876980 | 837 | 1204 |
| t877180 | 838 | 1205 |
| t877683 | 839 | 1206 |
| t877644 | 840 | 1207 |
| t877073 | 841 | 1208 |
| t876943 | 842 | 1209 |
| t877698 | 843 | 1210 |
| t876904 | 844 | 1211 |
| t877088 | 845 | 1212 |
| t877718 | 846 | 1213 |
| t877744 | 847 | 1214 |
| t876853 | 848 | 1215 |
| t876826 | 849 | 1216 |
| t876768 | 850 | 1217 |
| t876806 | 851 | 1218 |
| t876753 | 852 | 1219 |
| t876945 | 853 | 1220 |
| t876778 | 854 | 1221 |
| t877741 | 855 | 1222 |
| t877709 | 856 | 1223 |
| t876870 | 857 | 1224 |
| t876764 | 858 | 1225 |
| t877503 | 859 | 1226 |
| t876781 | 860 | 1227 |
| t877662 | 861 | 1228 |
| t876782 | 862 | 1229 |
| t877612 | 863 | 1230 |
| t876802 | 864 | 1231 |
| t876749 | 865 | 1232 |
| t876751 | 866 | 1233 |
| t877013 | 867 | 1234 |
| t877700 | 868 | 1235 |
| t877544 | 869 | 1236 |
| t876755 | 870 | 1237 |
| t876985 | 871 | 1238 |
| t877090 | 872 | 1239 |
| t876773 | 873 | 1240 |
| t876878 | 874 | 1241 |
| t877536 | 875 | 1242 |
| t877511 | 876 | 1243 |
| t877654 | 877 | 1244 |
| t877743 | 878 | 1245 |
| t877064 | 879 | 1246 |
| t877471 | 880 | 1247 |
| t877011 | 881 | 1248 |
| t876957 | 882 | 1249 |
| t876882 | 883 | 1250 |
| t876914 | 884 | 1251 |
| t877516 | 885 | 1252 |
| t876936 | 886 | 1253 |
| t877152 | 887 | 1254 |
| t877282 | 888 | 1255 |
| t876766 | 889 | 1256 |
| t876776 | 890 | 1257 |
| t876801 | 891 | 1258 |
| t877577 | 892 | 1259 |
| t877608 | 893 | 1260 |
| t877294 | 894 | 1261 |
| t876810 | 895 | 1262 |
| t876939 | 896 | 1263 |
| t877249 | 897 | 1264 |
| t877626 | 898 | 1265 |
| t876845 | 899 | 1266 |
| t877581 | 900 | 1267 |
| t876815 | 901 | 1268 |
| t877063 | 902 | 1269 |
| t877625 | 903 | 1270 |
| t877629 | 904 | 1271 |
| t876821 | 905 | 1272 |
| t876911 | 906 | 1273 |
| t877087 | 907 | 1274 |
| t877554 | 908 | 1275 |
| t877098 | 909 | 1276 |
| t876790 | 910 | 1277 |
| t876865 | 911 | 1278 |
| t876883 | 912 | 1279 |
| t877039 | 913 | 1280 |
| t876772 | 914 | 1281 |
| t877026 | 915 | 1282 |
| t876903 | 916 | 1283 |
| t877167 | 917 | 1284 |
| t877723 | 918 | 1285 |
| t877230 | 919 | 1286 |
| t877248 | 920 | 1287 |
| t877258 | 921 | 1288 |
| t877449 | 922 | 1289 |
| t877290 | 923 | 1290 |
| t877304 | 924 | 1291 |
| t877397 | 925 | 1292 |
| t877264 | 926 | 1293 |
| t877383 | 927 | 1294 |
| t877429 | 928 | 1295 |
| t877292 | 929 | 1296 |
| t877362 | 930 | 1297 |
| t877354 | 931 | 1298 |
| t877360 | 932 | 1299 |
| t876909 | 933 | 1300 |
| t877352 | 934 | 1301 |
| t877387 | 935 | 1302 |
| t877109 | 936 | 1303 |
| t877325 | 937 | 1304 |
| t877323 | 938 | 1305 |
| t877321 | 939 | 1306 |
| t877364 | 940 | 1307 |
| t877447 | 941 | 1308 |
| t877080 | 942 | 1309 |
| t877356 | 943 | 1310 |
| t877255 | 944 | 1311 |
| t877481 | 945 | 1312 |
| t877455 | 946 | 1313 |
| t877023 | 947 | 1314 |
| t877057 | 948 | 1315 |

### EQUIVALENTS

[0506] Those skilled in the art will recognize, or be able to ascertain using no more than routine experimentation, many equivalents to the specific embodiments of the invention described here. Such equivalents are intended to be encompassed by the following claims.

[0507] All references, including patent documents, are incorporated by reference in their entirety.

1. A host cell that comprises a heterologous polynucleotide encoding a polyketide cyclase (PKC), wherein the PKC comprises an amino acid deletion or substitution at one or more residues corresponding to position 2, 3, 13, 17, 18, 19, 20, 21, 22, 24, 25, 26, 28, 29, 31, 33, 37, 38, 39, 41, 45, 46, 48, 49, 50, 52, 53, 55, 56, 57, 59, 60, 61, 62, 64, 65, 66, 67, 68, 69, 70, 71, 73, 74, 80, 81, 82, 83, 84, 85, 86, 87, 88, 89, 94, 95, 97, 98, 100, and/or 101 in SEQ ID NO: 1.

2. The host cell of claim 1, wherein the PKC comprises:
a) the amino acid G at a residue corresponding to position 2 in SEQ ID NO: 1 or a deletion of a residue corresponding to position 2 in SEQ ID NO: 1;
b) the amino acid M or Y at a residue corresponding to position 3 in SEQ ID NO: 1;
c) the amino acid R or K at a residue corresponding to position 13 in SEQ ID NO: 1;
d) the amino acid N at a residue corresponding to position 17 in SEQ ID NO: 1;
e) the amino acid D or R at a residue corresponding to position 18 in SEQ ID NO: 1;
f) the amino acid E or D at a residue corresponding to position 19 in SEQ ID NO: 1;
g) the amino acid A at a residue corresponding to position 20 in SEQ ID NO: 1;
h) the amino acid K at a residue corresponding to position 21 in SEQ ID NO: 1;
i) the amino acid T or K at a residue corresponding to position 22 in SEQ ID NO: 1;
j) the amino acid M at a residue corresponding to position 24 in SEQ ID NO: 1;
k) the amino acid A or N at a residue corresponding to position 25 in SEQ ID NO: 1;
l) the amino acid H, R, A, or E at a residue corresponding to position 26 in SEQ ID NO: 1;
m) the amino acid A, S, E, or H at a residue corresponding to position 28 in SEQ ID NO: 1;
n) the amino acid D, S, E, or T at a residue corresponding to position 29 in SEQ ID NO: 1;
o) the amino acid L or A at a residue corresponding to position 31 in SEQ ID NO: 1;
p) the amino acid H, R, D, E, K, Q, or N at a residue corresponding to position 33 in SEQ ID NO: 1;
q) the amino acid L at a residue corresponding to position 37 in SEQ ID NO: 1;
r) the amino acid L at a residue corresponding to position 38 in SEQ ID NO: 1;
s) the amino acid G, S, or Q at a residue corresponding to position 39 in SEQ ID NO: 1;
t) the amino acid K or R at a residue corresponding to position 41 in SEQ ID NO: 1;
u) the amino acid I at a residue corresponding to position 45 in SEQ ID NO: 1;
v) the amino acid F at a residue corresponding to position 46 in SEQ ID NO: 1;
w) the amino acid A at a residue corresponding to position 48 in SEQ ID NO: 1;
x) the amino acid Q at a residue corresponding to position 49 in SEQ ID NO: 1;
y) the amino acid K, F, or W at a residue corresponding to position 50 in SEQ ID NO: 1;
z) the amino acid H at a residue corresponding to position 52 in SEQ ID NO: 1;
aa) the amino acid H at a residue corresponding to position 53 in SEQ ID NO: 1;
bb) the amino acid F at a residue corresponding to position 55 in SEQ ID NO: 1;
cc) the amino acid Y at a residue corresponding to position 56 in SEQ ID NO: 1;
dd) the amino acid Y at a residue corresponding to position 57 in SEQ ID NO: 1;
ee) the amino acid I or F at a residue corresponding to position 59 in SEQ ID NO: 1;
ff) the amino acid I or L at a residue corresponding to position 60 in SEQ ID NO: 1;
gg) the amino acid T, D, or S at a residue corresponding to position 61 in SEQ ID NO: 1;
hh) the amino acid M at a residue corresponding to position 62 in SEQ ID NO: 1;
ii) the amino acid Q or D at a residue corresponding to position 64 in SEQ ID NO: 1;
jj) the amino acid N at a residue corresponding to position 65 in SEQ ID NO: 1;
kk) the amino acid L, M, or Y at a residue corresponding to position 66 in SEQ ID NO: 1;
ll) the amino acid K at a residue corresponding to position 67 in SEQ ID NO: 1;
mm) the amino acid E, G, or H at a residue corresponding to position 68 in SEQ ID NO: 1;
nn) the amino acid L or Y at a residue corresponding to position 69 in SEQ ID NO: 1;
oo) the amino acid A or L at a residue corresponding to position 70 in SEQ ID NO: 1;
pp) the amino acid Q, S, or E at a residue corresponding to position 71 in SEQ ID NO: 1;
qq) the amino acid L at a residue corresponding to position 73 in SEQ ID NO: 1;
rr) the amino acid D, E, H, Q, S, G, or L at a residue corresponding to position 74 in SEQ ID NO: 1;
ss) the amino acid V, A, E, S, D, or N at a residue corresponding to position 80 in SEQ ID NO: 1;
tt) the amino acid Y at a residue corresponding to position 81 in SEQ ID NO: 1;
uu) the amino acid K, V, or R at a residue corresponding to position 82 in SEQ ID NO: 1;
vv) the amino acid A, E, G, K, N, Q, R, or S at a residue corresponding to position 83 in SEQ ID NO: 1;
ww) the amino acid F, K, M, or Q at a residue corresponding to position 84 in SEQ ID NO: 1;
xx) the amino acid A or F at a residue corresponding to position 85 in SEQ ID NO: 1;
yy) the amino acid N, G, or S at a residue corresponding to position 86 in SEQ ID NO: 1;
zz) the amino acid C, D, or K at a residue corresponding to position 87 in SEQ ID NO: 1;
aaa) the amino acid Y, N, or S at a residue corresponding to position 88 in SEQ ID NO: 1;
bbb) the amino acid V or M at a residue corresponding to position 89 in SEQ ID NO: 1;
ccc) the amino acid V at a residue corresponding to position 94 in SEQ ID NO: 1;
ddd) the amino acid M or I at a residue corresponding to position 95 in SEQ ID NO: 1;
eee) the amino acid F at a residue corresponding to position 97 in SEQ ID NO: 1;
fff) the amino acid E, K, or Y at a residue corresponding to position 98 in SEQ ID NO: 1;
ggg) the amino acid A, G, K, N, Q, or S at a residue corresponding to position 100 in SEQ ID NO: 1; and/or
hhh) the amino acid A or E at a residue corresponding to position 101 in SEQ ID NO: 1.

3. The host cell of claim 1 or 2, wherein the PKC comprises an amino acid deletion or substitution at one or more residues corresponding to position 2, 3, 13, 17, 18, 19, 20, 21, 22, 24, 25, 26, 28, 29, 31, 33, 37, 38, 39, 45, 46, 48, 49, 50, 52, 53, 55, 56, 57, 59, 60, 61, 62, 64, 65, 66, 67, 68, 70, 71, 74, 80, 82, 83, 84, 85, 86, 87, 88, 89, 94, 95, 97, 98, 100, and 101 in SEQ ID NO: 1.

4. The host cell of claim 3, wherein the PKC comprises:
a) the amino acid G at a residue corresponding to position 2 in SEQ ID NO: 1 or a deletion of a residue corresponding to position 2 in SEQ ID NO: 1;
b) the amino acid Y at a residue corresponding to position 3 in SEQ ID NO: 1;
c) the amino acid R or K at a residue corresponding to position 13 in SEQ ID NO: 1;
d) the amino acid N at a residue corresponding to position 17 in SEQ ID NO: 1;
e) the amino acid D or R at a residue corresponding to position 18 in SEQ ID NO: 1;
f) the amino acid D at a residue corresponding to position 19 in SEQ ID NO: 1;
g) the amino acid A at a residue corresponding to position 20 in SEQ ID NO: 1;
h) the amino acid K at a residue corresponding to position 21 in SEQ ID NO: 1;
i) the amino acid K at a residue corresponding to position 22 in SEQ ID NO: 1;
j) the amino acid M at a residue corresponding to position 24 in SEQ ID NO: 1;
k) the amino acid A or N at a residue corresponding to position 25 in SEQ ID NO: 1;
l) the amino acid H, R, or A at a residue corresponding to position 26 in SEQ ID NO: 1;
m) the amino acid E or H at a residue corresponding to position 28 in SEQ ID NO: 1;
n) the amino acid S, E, or T at a residue corresponding to position 29 in SEQ ID NO: 1;
o) the amino acid L at a residue corresponding to position 31 in SEQ ID NO: 1;
p) the amino acid H, R, N at a residue corresponding to position 33 in SEQ ID NO: 1;
q) the amino acid L at a residue corresponding to position 37 in SEQ ID NO: 1;
r) the amino acid L at a residue corresponding to position 38 in SEQ ID NO: 1;
s) the amino acid G or Q at a residue corresponding to position 39 in SEQ ID NO: 1;
t) the amino acid I at a residue corresponding to position 45 in SEQ ID NO: 1;
u) the amino acid F at a residue corresponding to position 46 in SEQ ID NO: 1;
v) the amino acid A at a residue corresponding to position 48 in SEQ ID NO: 1;
w) the amino acid Q at a residue corresponding to position 49 in SEQ ID NO: 1;
x) the amino acid F, W, or K at a residue corresponding to position 50 in SEQ ID NO: 1;
y) the amino acid H at a residue corresponding to position 52 in SEQ ID NO: 1;
z) the amino acid H at a residue corresponding to position 53 in SEQ ID NO: 1;
aa) the amino acid F at a residue corresponding to position 55 in SEQ ID NO: 1;
bb) the amino acid Y at a residue corresponding to position 56 in SEQ ID NO: 1;
cc) the amino acid Y at a residue corresponding to position 57 in SEQ ID NO: 1;
dd) the amino acid F at a residue corresponding to position 59 in SEQ ID NO: 1;
ee) the amino acid I or L at a residue corresponding to position 60 in SEQ ID NO: 1;
ff) the amino acid D, S, or T at a residue corresponding to position 61 in SEQ ID NO: 1;
gg) the amino acid M at a residue corresponding to position 62 in SEQ ID NO: 1;
hh) the amino acid D at a residue corresponding to position 64 in SEQ ID NO: 1;
ii) the amino acid N at a residue corresponding to position 65 in SEQ ID NO: 1;
jj) the amino acid Y at a residue corresponding to position 66 in SEQ ID NO: 1;
kk) the amino acid K at a residue corresponding to position 67 in SEQ ID NO: 1;
ll) the amino acid G or H at a residue corresponding to position 68 in SEQ ID NO: 1;
mm) the amino acid A or L at a residue corresponding to position 70 in SEQ ID NO: 1;
nn) the amino acid Q, S, or E at a residue corresponding to position 71 in SEQ ID NO: 1;
oo) the amino acid G at a residue corresponding to position 74 in SEQ ID NO: 1;
pp) the amino acid V, A, D, or N at a residue corresponding to position 80 in SEQ ID NO: 1;
qq) the amino acid K or R at a residue corresponding to position 82 in SEQ ID NO: 1;
rr) the amino acid A, E, G, K, N, Q, R, or S at a residue corresponding to position 83 in SEQ ID NO: 1;
ss) the amino acid F or K at a residue corresponding to position 84 in SEQ ID NO: 1;
tt) the amino acid A or F at a residue corresponding to position 85 in SEQ ID NO: 1;
uu) the amino acid S at a residue corresponding to position 86 in SEQ ID NO: 1;
vv) the amino acid C or K at a residue corresponding to position 87 in SEQ ID NO: 1;
ww) the amino acid Y, N, or S at a residue corresponding to position 88 in SEQ ID NO: 1;
xx) the amino acid M at a residue corresponding to position 89 in SEQ ID NO: 1;
yy) the amino acid V at a residue corresponding to position 94 in SEQ ID NO: 1;
zz) the amino acid M or I at a residue corresponding to position 95 in SEQ ID NO: 1;
aaa) the amino acid F at a residue corresponding to position 97 in SEQ ID NO: 1;
bbb) the amino acid E, K, or Y at a residue corresponding to position 98 in SEQ ID NO: 1;
ccc) the amino acid A, G, K, N, Q, or S at a residue corresponding to position 100 in SEQ ID NO: 1; and/or
ddd) the amino acid A or E at a residue corresponding to position 101 in SEQ ID NO: 1.

5. The host cell of any one of claims 1-2, wherein the PKC comprises an amino acid substitution at a residue corresponding to position 2, 3, 13, 17, 18, 19, 20, 21, 22, 25, 26, 28, 29, 31, 33, 37, 38, 39, 41, 45, 50, 52, 53, 55, 56, 57, 60, 62, 64, 65, 67, 68, 70, 71, 74, 83, 84, 85, 86, 87, 88, 95, 97, 98, 100, and/or 101 in SEQ ID NO: 1 wherein the PKC is capable of producing olivetolic acid from 3,5,7-trioxododecanoyl-CoA, and wherein, if present:
a) the amino acid substitution at the residue corresponding to position 13 is D13R or D13K;
b) the amino acid substitution at the residue corresponding to position 21 is E21K;
c) the amino acid substitution at the residue corresponding to position 39 is D39G, D39S, or D39Q;
d) the amino acid substitution at the residue corresponding to position 50 is N50K;
e) the amino acid substitution at the residue corresponding to position 52 is E52H;
f) the amino acid substitution at the residue corresponding to position 67 is E67K;
g) the amino acid substitution at the residue corresponding to position 70 is Q70A or Q70L;
h) the amino acid substitution at the residue corresponding to position 71 is D71Q or D71S;
i) the amino acid substitution at the residue corresponding to position 74 is I74D, 174E, 174H, or 174Q;
j) the amino acid substitution at the residue corresponding to position 83 is D83A or D83G;
k) the amino acid substitution at the residue corresponding to position 86 is R86G;
l) the amino acid substitution at the residue corresponding to position 87 is S87D or S87K; and
m) the amino acid substitution at the residue corresponding to position 100 is R100A, R100G, R100K, R100N, R100Q, or R100S.

6. The host cell of any one of claims 1-2, wherein the PKC comprises an amino acid substitution at a residue corresponding to position 2, 3, 13, 17, 18, 19, 20, 21, 22, 25, 26, 28, 29, 31, 33, 37, 38, 39, 45, 50, 52, 53, 55, 56, 57, 60, 62, 64, 65, 67, 68, 70, 71, 83, 84, 85, 87, 88, 95, 97, 98, 100, and/or 101 in SEQ ID NO: 1, and wherein, if present:
a) the amino acid substitution at the residue corresponding to position 13 is D13R or D13K;
b) the amino acid substitution at the residue corresponding to position 21 is E21K;
c) the amino acid substitution at the residue corresponding to position 39 is D39G or D39Q;
d) the amino acid substitution at the residue corresponding to position 50 is N50K;
e) the amino acid substitution at the residue corresponding to position 52 is E52H;
f) the amino acid substitution at the residue corresponding to position 67 is E67K;
g) the amino acid substitution at the residue corresponding to position 70 is Q70A or Q70L;
h) the amino acid substitution at the residue corresponding to position 71 is D71Q or D71S;
i) the amino acid substitution at the residue corresponding to position 83 is D83A or D83G;
j) the amino acid substitution at the residue corresponding to position 87 is S87K; and
k) the amino acid substitution at the residue corresponding to position 100 is R100S.

7. The host cell of any one of claims 1-2, wherein the PKC comprises one or more amino acid substitutions or deletions located in a domain corresponding to:
a) beta sheet 1 (positions 1-11 in SEQ ID NO: 1);
b) loop 1 (positions 12-16 in SEQ ID NO: 1);
c) helix 1 (positions 17-29 in SEQ ID NO: 1);
d) 310 helix 1 (positions 30-32 in SEQ ID NO: 1);
e) loop 2 (positions 33-38 in SEQ ID NO: 1);
f) beta sheet 2 (positions 39-44 in SEQ ID NO: 1);
g) loop 3 (positions 45-56 in SEQ ID NO: 1);
h) beta sheet 3 (positions 57-62 in SEQ ID NO: 1);
i) loop 4 (positions 63-65 in SEQ ID NO: 1);
j) helix 2 (positions 66-73 in SEQ ID NO: 1);
k) turn 1 (positions 74-75 in SEQ ID NO: 1);
l) helix 3 (positions 76-85 in SEQ ID NO: 1);
m) 310 helix 2 (positions 86-88 in SEQ ID NO: 1);
n) beta sheet 4 (positions 89-97 in SEQ ID NO: 1); and/or
o) loop 5 (positions 98-101 in SEQ ID NO: 1).

8. The host cell of any one of claims 1-2 or claim 7, wherein one or more amino acid substitutions are located in a domain corresponding to:
a) helix 1 (positions 17-29 in SEQ ID NO: 1);
b) loop 3 (positions 45-56 in SEQ ID NO: 1);
c) helix 2 (positions 66-73 in SEQ ID NO: 1); and/or
d) helix 3 (positions 76-85 in SEQ ID NO: 1).

9. The host cell of claim 8, wherein the one or more amino acid substitutions increase the stability of a kinked helix defined by the domains corresponding to helix 2 (positions 66-73 in SEQ ID NO: 1), turn 1 (positions 74-75 in SEQ ID NO: 1), and helix 3 (positions 76-85 in SEQ ID NO: 1) and/or improve conformation of a binding pocket of the PKC to 3,5,7-trioxododecanoyl-CoA and/or olivetolic acid.

10. The host cell of claim 9, wherein one or more amino acid substitutions are located in a domain corresponding to: loop 3 (positions 45-56 in SEQ ID NO: 1); helix 2 (positions 66-73 in SEQ ID NO: 1); and helix 3 (positions 76-85 in SEQ ID NO: 1).

11. The host cell of any one of claims 1-2 or 7-10, wherein the PKC comprises a deletion or amino acid substitution at a residue corresponding to position 2, 18, 22, 24, 25, 26, 28, 29, 33, 52, 53, 57, 60, 62, 70, 82, 83, 84, 87, and/or 88 in SEQ ID NO: 1.

12. The host cell of claim 11, wherein the PKC comprises an amino acid substitution at a residue corresponding to position 18, 29, 53, 70, 82 and/or 83 in SEQ ID NO:1.

13. The host cell of claim 12, wherein the PKC comprises:
a) a deletion at a residue corresponding to position 2 in SEQ ID NO: 1;
b) the amino acid D or R at a residue corresponding to position 18 in SEQ ID NO: 1;
c) the amino acid K at a residue corresponding to position 22 in SEQ ID NO: 1;
d) the amino acid M at a residue corresponding to position 24 in SEQ ID NO: 1;
e) the amino acid N at a residue corresponding to position 25 in SEQ ID NO: 1;
f) the amino acid A or H at a residue corresponding to position 26 in SEQ ID NO: 1;
g) the amino acid E at a residue corresponding to position 28 in SEQ ID NO: 1;
h) the amino acid E or S at a residue corresponding to position 29 in SEQ ID NO: 1;
i) the amino acid H or R at a residue corresponding to position 33 in SEQ ID NO: 1;
j) the amino acid H at a residue corresponding to position 52 in SEQ ID NO: 1;
k) the amino acid H at a residue corresponding to position 53 in SEQ ID NO: 1;
l) the amino acid Y at a residue corresponding to position 57 in SEQ ID NO: 1;
m) the amino acid I at a residue corresponding to position 60 in SEQ ID NO: 1;
n) the amino acid M at a residue corresponding to position 62 in SEQ ID NO: 1;
o) the amino acid L at a residue corresponding to position 70 in SEQ ID NO: 1;
p) the amino acid K at a residue corresponding to position 82 in SEQ ID NO: 1;
q) the amino acid A, K, or R at a residue corresponding to position 83 in SEQ ID NO: 1;
r) the amino acid F or K at a residue corresponding to position 84 in SEQ ID NO: 1;
s) the amino acid C or K at a residue corresponding to position 87 in SEQ ID NO: 1; and/or
t) the amino acid Y at a residue corresponding to position 88 in SEQ ID NO: 1.

14. The host cell of claim 12 or 13, wherein relative to SEQ ID NO: 1, the PKC comprises: E53H, G82K, and Q70L.

15. The host cell of claim 1 or 2, wherein relative to SEQ ID NO: 1, the PKC comprises:
a) A18D, T26A, V28E, N29S, E53H, E60I, Q70L, G82K, D83A, and S87K;
b) A18D, E22K, N29S, E53H, Q70L, G82K, D83R, S87K, and F₈₈Y;
c) A18D, E22K, N29S, E53H, Q70L, G82K, D83K, S87K, and F₈₈Y;
d) A18D, E22K, N29S, I33R, E53H, Q70L, G82K, D83A, S87K, and F₈₈Y;
e) A18D, E22K, K25N, T26A, N29S, E53H, Q70L, G82K, D83A, and S87K;
f) A18D, E22K, N29S, E53H, Q70L, G82K, D83A, V84K, S87K, and F₈₈Y;
g) A18D, E22K, T26A, N29S, E53H, Q70L, G82K, D83A, S87K, and F₈₈Y;
h) A18D, E22K, T26H, N29S, E53H, Q70L, G82K, D83A, S87K, and F₈₈Y;
i) A18D, E22K, N29S, I33H, E53H, Q70L, G82K, D83A, S87K, and F₈₈Y;
j) A18D, E22K, N29S, E53H, Q70L, G82K, D83A, V84F, S87K, and F₈₈Y;
k) A18D, T26A, N29S, E53H, Q70L, G82K, D83A, and F₈₈Y;
l) A18D, E22K, T26A, N29S, E53H, Q70L, G82K, D83A, and S87K;
m) A18D, T26A, N29S, E53H, Q70L, G82K, D83A, S87K, and F₈₈Y;
n) A18D, T26A, N29S, E53H, Q70L, G82K, and D83A;
o) A18D, E22K, T26A, N29S, E53H, Q70L, G82K, D83A, and F₈₈Y;
p) A18D, E22K, N29S, E53H, Q70L, G82K, D83A, S87K, and F₈₈Y;
q) A18D, T26A, V28E, N29S, E53H, Q70L, G82K, D83A, and S87K;
r) A18R, E22K, N29S, E53H, Q70L, G82K, D83A, S87K, and F₈₈Y;
s) deletion of a residue corresponding to position 2 in SEQ ID NO: 1, A18D, E22K, N29S, E53H, Q70L, G82K, D83A, S87K, and F₈₈Y;
t) A18D, E22K, N29S, E53H, T62M, Q70L, G82K, D83A, S87K, and F₈₈Y;
u) A18D, E22K, T26A, N29E, E53H, Q70L, G82K, D83A, and S87K;
v) A18D, E22K, N29S, E52H, E53H, Q70L, G82K, D83A, S87K, and F₈₈Y;
w) A18D, E22K, N29S, E53H, Q70L, G82K, D83A, S87C, and F₈₈Y;
x) A18D, E22K, F₂₄M, N29S, E53H, Q70L, G82K, D83A, S87K, and F₈₈Y;
y) A18D, N29S, E53H, Q70L, G82K, D83A, and F₈₈Y;
z) A18D, N29S, E53H, Q70L, G82K, D83A, S87K, and F₈₈Y;
aa) A18D, E22K, T26A, N29S, E53H, H₅₇Y, Q70L, G82K, D83A, and S87K;
bb) I33R, E52H, Y55F, Q70A, G80A, D83K, and V84K;
cc) D13R, A18D, N29S, Q70L, D71Q, G80A, and D83K;
dd) I33R, E52H, Y55F, Q70A, 174G, and D83K;
ee) T26R, I33H, E52H, Y55F, Q70A, and D83K;
ff) A18D, T26R, E52H, Y55F, Q70A, G80A, D83N, V84K, and Y85A;
gg) T26R, I33H, Y55F, Q70A, G80A, D83K, and Y85A;
hh) E22K, T26H, N29S, D39G, K49Q, E52H, D83N, and V84K;
ii) E17N, A18D, V31L, D71S, D83A, and V84F; or
jj) A18D, V31L, D39Q, D71S, D83A, and V84F.

16. The host cell of claim 1 or 2, wherein the PKC comprises an amino acid substitution at a residue corresponding to position 17, 18, 26, 29, 31, 33, 37, 39, 71, 80, 83, 84, and/or 95 in SEQ ID NO: 1.

17. The host cell of claim 16, wherein the PKC comprises:
a) the amino acid N at a residue corresponding to position 17 in SEQ ID NO: 1;
b) the amino acid D at a residue corresponding to position 18 in SEQ ID NO: 1;
c) the amino acid A or H at a residue corresponding to position 26 in SEQ ID NO: 1;
d) the amino acid T at a residue corresponding to position 29 in SEQ ID NO: 1;
e) the amino acid L at a residue corresponding to position 31 in SEQ ID NO: 1;
f) the amino acid R, H, or N at a residue corresponding to position 33 in SEQ ID NO: 1;
g) the amino acid L at a residue corresponding to position 37 in SEQ ID NO: 1;
h) the amino acid Q or G at a residue corresponding to position 39 in SEQ ID NO: 1;
i) the amino acid S at a residue corresponding to position 71 in SEQ ID NO: 1;
j) the amino acid A at a residue corresponding to position 80 in SEQ ID NO: 1;
k) the amino acid Q, N, or A at a residue corresponding to position 83 in SEQ ID NO: 1;
l) the amino acid F at a residue corresponding to position 84 in SEQ ID NO: 1; and/or
m) the amino acid M at a residue corresponding to position 95 in SEQ ID NO: 1.

18. The host cell of claim 16 or 17, wherein relative to SEQ ID NO: 1, the PKC comprises:
a) E17N, A18D, and D39G;
b) D39Q, and F₉₅M;
c) I33N and F₉₅M;
d) E17N, I33R, and F₉₅M;
e) T26H, D83Q, and F₉₅M;
f) I33H, D39Q, and D71S;
g) N29T, I33N, and D71S;
h) I33N, D39Q, and F₉₅M;
i) D71S, D83N, and F₉₅M;
j) D39Q and D83Q;
k) A18D and M37L;
l) E17N, A18D, and I33N;
m) D39G, D71S, and V84F;
n) N29T and D39G;
o) A18D, D71S, and G80A;
p) N29T, V31L, and D39Q;
q) A18D, V31L, and D39G;
r) T26H, N29T, and D39Q;
s) T26A, N29T, and I33H;
t) D39Q, D71S, and G80A;
u) A18D, D39Q, and V84F;
v) E17N, I33R, and D39Q;
w) E17N, D71S, and F₉₅M;
x) E17N, I33N, and F₉₅M;
y) T26A, N29T, and V31L;
z) E17N, T26A, and D39G;
aa) A18D, D39Q, and D71S;
bb) V31L, D39G, and V84F;
cc) N29T, 133R, and D39Q;
dd) D39G, D71S, and D83N;
ee) V31L, D71S, and D83Q;
ff) I33R, D39Q, and V84F;
gg) D39G and D71S;
hh) E17N, 133H, and D71S;
ii) T26H, D39G, and V84F;
jj) A18D, 133R, and D39G;
kk) T26A, D83N, and F₉₅M;
ll) V31L, I33H, and D71S;
mm) V31L, D39G, and D71S;
nn) A18D and D39Q;
oo) 133R, D39G, and D71S;
pp) E17N, G80A, and D83N;
qq) A18D, N29T, and V31L;
rr) D39Q, D71S, and D83A;
ss) A18D, T26H, and D39Q;
tt) T26A and F₉₅M;
uu) I33H, D39G, and D83Q;
vv) T26H, 133N, and G80A;
ww) I33R, D39G, and F₉₅M;
xx) V31L, 133R, and D83N;
yy) N29T, D39G, and V84F;
zz) D71S and D83Q;
aaa) I33H, D39Q, and G80A;
bbb) E17N, D39G, and D83A;
ccc) E17N, 133N, and V84F;
ddd) N29T, 133N, and D83Q;
eee) I33N, D71S, and G80A;
fff) I33R, D39G, and D83N;
ggg) T26A and N29T;
hhh) I33H, D83Q, and F₉₅M;
iii) T26A, V31L, and D39Q;
jjj) E17N, V31L, and I33N;
kkk) E17N, T26A, and M37L; or
111) N29T and 133N.

19. The host cell of claim 1 or 2, wherein the PKC comprises an amino acid substitution at a residue corresponding to position 13, 18, 22, 26, 29, 33, 39, 49, 52, 55, 61, 64, 65, 66, 68, 70, 71, 74, 80, 83, 84, 85, and/or 98 in SEQ ID NO: 1.

20. The host cell of claim 19, wherein the PKC comprises:
a) the amino acid R at a residue corresponding to position 13 in SEQ ID NO: 1;
b) the amino acid D at a residue corresponding to position 18 in SEQ ID NO: 1;
c) the amino acid K at a residue corresponding to position 22 in SEQ ID NO: 1;
d) the amino acid R or H at a residue corresponding to position 26 in SEQ ID NO: 1;
e) the amino acid S at a residue corresponding to position 29 in SEQ ID NO: 1;
f) the amino acid R or H at a residue corresponding to position 33 in SEQ ID NO: 1;
g) the amino acid G at a residue corresponding to position 39 in SEQ ID NO: 1;
h) the amino acid Q at a residue corresponding to position 49 in SEQ ID NO: 1;
i) the amino acid H at a residue corresponding to position 52 in SEQ ID NO: 1;
j) the amino acid F at a residue corresponding to position 55 in SEQ ID NO: 1;
k) the amino acid D at a residue corresponding to position 61 in SEQ ID NO: 1;
l) the amino acid D at a residue corresponding to position 64 in SEQ ID NO: 1;
m) the amino acid N at a residue corresponding to position 65 in SEQ ID NO: 1;
n) the amino acid Y at a residue corresponding to position 66 in SEQ ID NO: 1;
o) the amino acid G at a residue corresponding to position 68 in SEQ ID NO: 1;
p) the amino acid A or L at a residue corresponding to position 70 in SEQ ID NO: 1;
q) the amino acid E or Q at a residue corresponding to position 71 in SEQ ID NO: 1;
r) the amino acid G at a residue corresponding to position 74 in SEQ ID NO: 1;
s) the amino acid N or A at a residue corresponding to position 80 in SEQ ID NO: 1;
t) the amino acid K or N at a residue corresponding to position 83 in SEQ ID NO: 1;
u) the amino acid K at a residue corresponding to position 84 in SEQ ID NO: 1;
v) the amino acid F or A at a residue corresponding to position 85 in SEQ ID NO: 1; and/or
w) the amino acid E or K at a residue corresponding to position 98 in SEQ ID NO: 1.

21. The host cell of claim 20, wherein relative to SEQ ID NO: 1, the PKC comprises:
a) Y85F;
b) E64D, D71E, and T98K;
c) S65N;
d) V66Y;
e) G80N;
f) T68G;
g) D71E;
h) E64D and D71E;
i) D71E and Y85F;
j) I33R, E52H, Y55F, Q70A, G80A, D83K, and V84K;
k) D13R, A18D, N29S, Q70L, D71Q, G80A, and D83K;
l) I33R, E52H, Y55F, Q70A, I74G, and D83K;
m) Y55F, G80A, and D83K;
n) T26R, I33H, E52H, Y55F, Q70A, and D83K;
o) A18D, T26R, E52H, Y55F, Q70A, G80A, D83N, V84K, and Y85A;
p) T98E;
q) T26R, I33H, Y55F, Q70A, G80A, D83K, and Y85A;
r) V61D; or
s) E22K, T26H, N29S, D39G, K49Q, E52H, D83N, and V84K.

22. The host cell of any one of claims 1-2, wherein the PKC comprises an amino acid substitution at a residue corresponding to position 13, 17, 18, 22, 26, 29, 31, 33, 39, 52, 55, 61, 64, 65, 66, 70, 71, 74, 80, 82, 83, 84, 85, 88, 95, and/or 98 in SEQ ID NO: 1.

23. The host cell of claim 22, wherein the PKC comprises:
a) the amino acid R at a residue corresponding to position 13 in SEQ ID NO: 1;
b) the amino acid N at a residue corresponding to position 17 in SEQ ID NO: 1;
c) the amino acid D at a residue corresponding to position 18 in SEQ ID NO: 1;
d) the amino acid K at a residue corresponding to position 22 in SEQ ID NO: 1;
e) the amino acid R at a residue corresponding to position 26 in SEQ ID NO: 1;
f) the amino acid S at a residue corresponding to position 29 in SEQ ID NO: 1;
g) the amino acid L at a residue corresponding to position 31 in SEQ ID NO: 1;
h) the amino acid H, N, or R at a residue corresponding to position 33 in SEQ ID NO: 1;
i) the amino acid G or Q at a residue corresponding to position 39 in SEQ ID NO: 1;
j) the amino acid H at a residue corresponding to position 52 in SEQ ID NO: 1;
k) the amino acid F at a residue corresponding to position 55 in SEQ ID NO: 1;
l) the amino acid S at a residue corresponding to position 61 in SEQ ID NO: 1;
m) the amino acid D at a residue corresponding to position 64 in SEQ ID NO: 1;
n) the amino acid N at a residue corresponding to position 65 in SEQ ID NO: 1;
o) the amino acid Y at a residue corresponding to position 66 in SEQ ID NO: 1;
p) the amino acid A or L at a residue corresponding to position 70 in SEQ ID NO: 1;
q) the amino acid E, Q, or S at a residue corresponding to position 71 in SEQ ID NO: 1;
r) the amino acid G at a residue corresponding to position 74 in SEQ ID NO: 1;
s) the amino acid A at a residue corresponding to position 80 in SEQ ID NO: 1;
t) the amino acid R at a residue corresponding to position 82 in SEQ ID NO: 1;
u) the amino acid A, E, K, or N at a residue corresponding to position 83 in SEQ ID NO: 1;
v) the amino acid F or K at a residue corresponding to position 84 in SEQ ID NO: 1;
w) the amino acid A or F at a residue corresponding to position 85 in SEQ ID NO: 1;
x) the amino acid N at a residue corresponding to position 88 in SEQ ID NO: 1;
y) the amino acid M at a residue corresponding to position 95 in SEQ ID NO: 1; and/or
z) the amino acid K or Y at a residue corresponding to position 98 in SEQ ID NO: 1.

24. The host cell of claim 22, wherein the PKC comprises an amino acid substitution at a residue corresponding to position 13, 17, 18, 22, 26, 31, 33, 39, 52, 55, 64, 65, 66, 70, 71, 74, 80, 82, 83, 84, 85, 88, and/or 98 in SEQ ID NO: 1.

25. The host cell of claim 24, wherein the PKC comprises:
a) the amino acid R at a residue corresponding to position 13 in SEQ ID NO:1;
b) the amino acid N at a residue corresponding to position 17 in SEQ ID NO:1;
c) the amino acid D at a residue corresponding to position 18 in SEQ ID NO:1;
d) the amino acid K at a residue corresponding to position 22 in SEQ ID NO:1;
e) the amino acid R at a residue corresponding to position 26 in SEQ ID NO:1;
f) the amino acid L at a residue corresponding to position 31 in SEQ ID NO:1;
g) the amino acid R, H or N at a residue corresponding to position 33 in SEQ ID NO:1;
h) the amino acid G at a residue corresponding to position 39 in SEQ ID NO:1;
i) the amino acid H at a residue corresponding to position 52 in SEQ ID NO:1;
j) the amino acid F at a residue corresponding to position 55 in SEQ ID NO:1;
k) the amino acid D at a residue corresponding to position 64 in SEQ ID NO:1;
l) the amino acid N at a residue corresponding to position 65 in SEQ ID NO:1;
m) the amino acid Y at a residue corresponding to position 66 in SEQ ID NO:1;
n) the amino acid A at a residue corresponding to position 70 in SEQ ID NO:1;
o) the amino acid S or E at a residue corresponding to position 71 in SEQ ID NO:1;
p) the amino acid R at a residue corresponding to position 82 in SEQ ID NO: 1;
q) the amino acid G at a residue corresponding to position 74 in SEQ ID NO:1;
r) the amino acid A at a residue corresponding to position 80 in SEQ ID NO:1;
s) the amino acid E, A, K, or N at a residue corresponding to position 83 in SEQ ID NO:1;
t) the amino acid K or F at a residue corresponding to position 84 in SEQ ID NO:1;
u) the amino acid F at a residue corresponding to position 85 in SEQ ID NO:1;
v) the amino acid N at a residue corresponding to position 88 in SEQ ID NO: 1; and/or
w) the amino acid K or Y at a residue corresponding to position 98 in SEQ ID NO:1.

26. The host cell of claim 24 or 25, wherein relative to SEQ ID NO: 1, the PKC comprises:
a) A18D, T26R, I33R, D39G, E52H, Y55F, E64D, Q70A, G80A, D83N, and V84K;
b) E17N, T26R, V31L, D71S, D83E, and V84F;
c) E17N, V31L, I33N, E64D, D71S, and V84F;
d) E17N, A18D, V31L, D71S, D83A, and V84F;
e) E17N, E22K, V31L, 133N, D71E, and V84F;
f) E17N, A18D, V31L, D71E, D83A, and V84F;
g) E17N, V31L, D71S, D83E, V84F, and T98Y;
h) V84K, T26R, D39G, D83E, T98K, and S65N;
i) E17N, A18D, V31L, I33N, D71S, D83E, and V84K;
j) E17N, A18D, V31L, D71S, I74G, D83E, and V84F;
k) E17N, V31L, I33N, D71S, V84K, and Y85F;
1) A18D, T26R, I33R, E52H, Y55F, V66Y, Q70A, G80A, D83N, V84K, and Y85F;
m) E17N, A18D, V31L, I33N, D71S, D83K, and V84K;
n) E17N, A18D, T26R, V31L, I33N, D71S, and V84K;
o) V84K, T26R, D39G, D13R, T98K, and S65N;
p) E17N, V31L, I33N, S65N, D71S, and V84K;
q) E17N, A18D, E22K, V31L, I33N, D71E, and V84F;
r) D13R, E17N, A18D, V31L, D71S, D83A, and V84K;
s) E17N, V31L, D39G, D71S, D83A, and V84K;
t) D13R, A18D, T26R, E52H, Y55F, Q70A, G80A, D83N, V84K, and Y85F;
u) E17N, A18D, T26R, V31L, D71S, D83A, and V84K;
v) E17N, V31L, I33N, D71S, G82R, and V84F;
w) E17N, V31L, I33N, D71S, V84K, and T98K;
x) V84K, T26R, D39G, D83E, D13R, and T98K;
y) V84K, T26R, D83E, D13R, T98K, and S65N;
z) E17N, V31L, I33N, V66Y, D71E, and V84F;
aa) E17N, A18D, V31L, I33N, D71E, and V84F;
bb) E17N, A18D, V31L, I33N, D71S, G80A, and V84F;
cc) A18D, T26R, E52H, Y55F, Q70A, G80A, D83N, V84K, Y85F, and F₈₈N;
dd) E17N, A18D, V31L, I33N, D71S, V84K, and T98K;
ee) E17N, A18D, V31L, I33N, S65N, D71S, and V84K;
ff) T26R, I33H, Y55F, Q70A, G80A, D83K, V84K, and F₈₈N;
gg) A18D, E22K, T26R, E52H, Y55F, Q70A, D71E, G80A, D83N, and V84K; or
hh) E17N, V31L, I33N, D71E, G82R, and V84F.

27. The host cell of any one of claims 1-26, wherein the PKC comprises a sequence that is at least 90% identical to any one of SEQ ID NOs: 19-106, 196-388, 582-669, 671-742, and 745-948.

28. The host cell of claim 27, wherein the PKC comprises a sequence that is at least 90% identical to any one of SEQ ID NOs: 19, 21, 23, 24, 26, 27, 29, 32, 33, 34, 35, 38, 40, 42, 43, 45, 48, 49, 50, 51, 53, 58, 60, 62, 65, 66, 67, 68, 78, 87, 91, 92, 94, 99, 103, 105, 219, 220, 231, 234, 240, 254, 255, 258 283, 289, 294, 344, 345, 349, 365, 582-603, 605, 606, 607, 608, 610, 611, 612, 614, 616, 617, 618, 622, 625, 627, 629, 631, 632, 633, 634, 637, 638, 639, 640, 641, 642, 643, 644, 646, 648, 651, 653, 654, 655, 656, 657, 658, 659, 660, 661, 662, 663, 666, 667, 668, 672, 673, 674, 675, 676, 679, 680, 683, 684, 685, 686, 691, 693, 694, 695, 696, 697, 699, 700, 703, 707, 711, 713, 714, 715, 724, 732, 734, 735, 736, 737, 738, 739, 749, 751, 765, 768, 790, 808, 810, 822, 828, 840, 846, 857, 862, 865, 921, 922, 858, 850, 851, 933, 871, 809, 926, 923, 924, 758, 747, 757, 875, 908, 823, 833, and 777.

29. The host cell of claim 27, wherein the PKC comprises a sequence selected from any one of SEQ ID NOs: 19-106, 196-388, 582-669, 671-742, and 745-948.

30. The host cell of claim 28, wherein the PKC comprises a sequence selected from any one of SEQ ID NOs: 19, 21, 23, 24, 26, 27, 29, 32, 33, 34, 35, 38, 40, 42, 43, 45, 48, 49, 50, 51, 53, 58, 60, 62, 65, 66, 67, 68, 78, 87, 91, 92, 94, 99, 103, 105, 219, 220, 231, 234, 240, 254, 255, 258 283, 289, 294, 344, 345, 349, 365, 582-603, 605, 606, 607, 608, 610, 611, 612, 614, 616, 617, 618, 622, 625, 627, 629, 631, 632, 633, 634, 637, 638, 639, 640, 641, 642, 643, 644, 646, 648, 651, 653, 654, 655, 656, 657, 658, 659, 660, 661, 662, 663, 666, 667, 668, 672, 673, 674, 675, 676, 679, 680, 683, 684, 685, 686, 691, 693, 694, 695, 696, 697, 699, 700, 703, 707, 711, 713, 714, 715, 724, 732, 734, 735, 736, 737, 738, 739, 749, 751, 765, 768, 790, 808, 810, 822, 828, 840, 846, 857, 862, 865, 921, 922, 858, 850, 851, 933, 871, 809, 926, 923, 924, 758, 747, 757, 875, 908, 823, 833, and 777,

31. The host cell of any one of claims 1-30, wherein the heterologous polynucleotide comprises a sequence that is at least 90% identical to any one of SEQ ID NOs: 107-194, 389-581, 949-1036, 1038-1109 and 1112-1315.

32. The host cell of claim 31, wherein the heterologous polynucleotide comprises a sequence selected from any one of SEQ ID NOs: 107-194, 389-581, 949-1036, 1038-1109 and 1112-1315.

33. The host cell of claim 31 or 32, wherein the heterologous polynucleotide comprises a sequence that is at least 90% identical to any one of SEQ ID NOs: 107, 109, 111, 112, 114, 115, 117, 120, 121, 122, 123, 126, 128, 130, 131, 133, 136, 137, 138, 139, 141, 146, 148, 150, 153, 154, 155, 156, 166, 175, 179, 180, 182, 187, 191, 193, 412, 413, 424, 427, 433, 447, 448, 451, 476, 482, 487, 537, 538, 542, 558, 949-970, 1074, 972, 973, 974, 975, 977, 978, 979, 981, 983, 984, 985, 989, 992, 994, 996, 998, 999, 1000, 1001, 1004, 1005, 1006, 1007, 1008, 1009, 1010, 1011, 1013, 1015, 1018, 1020, 1021, 1022, 1023, 1024, 1025, 1026, 1027, 1028, 1029, 1030, 1033, 1034, 1035, 1039, 1040, 1041, 1042, 1043, 1046, 1047, 1050, 1051, 1052, 1053, 1058, 1060, 1061, 1062, 1063, 1064, 1066, 1067, 1070, 1078, 1080, 1081, 1082, 1091, 1099, 1101, 1102, 1103, 1104, 1105, 1106, 1116, 1118, 1132, 1135, 1157, 1175, 1177, 1189, 1195, 1207, 1213, 1224, 1229, 1232, 1288, 1289, 1225, 1217, 1218, 1300, 1238, 1176, 1293, 1290, 1291, 1125, 1114, 1124, 1242, 1275, 1190, 1200, and 1144.

34. The host cell of claim 33, wherein the heterologous polynucleotide comprises a sequence selected from any one of SEQ ID NOs: 107, 109, 111, 112, 114, 115, 117, 120, 121, 122, 123, 126, 128, 130, 131, 133, 136, 137, 138, 139, 141, 146, 148, 150, 153, 154, 155, 156, 166, 175, 179, 180, 182, 187, 191, 193, 412, 413, 424, 427, 433, 447, 448, 451, 476, 482, 487, 537, 538, 542, 558, 949-970, 1074, 972, 973, 974, 975, 977, 978, 979, 981, 983, 984, 985, 989, 992, 994, 996, 998, 999, 1000, 1001, 1004, 1005, 1006, 1007, 1008, 1009, 1010, 1011, 1013, 1015, 1018, 1020, 1021, 1022, 1023, 1024, 1025, 1026, 1027, 1028, 1029, 1030, 1033, 1034, 1035, 1039, 1040, 1041, 1042, 1043, 1046, 1047, 1050, 1051, 1052, 1053, 1058, 1060, 1061, 1062, 1063, 1064, 1066, 1067, 1070, 1078, 1080, 1081, 1082, 1091, 1099, 1101, 1102, 1103, 1104, 1105, 1106, 1116, 1118, 1132, 1135, 1157, 1175, 1177, 1189, 1195, 1207, 1213, 1224, 1229, 1232, 1288, 1289, 1225, 1217, 1218, 1300, 1238, 1176, 1293, 1290, 1291, 1125, 1114, 1124, 1242, 1275, 1190, 1200, and 1144.

35. The host cell of any one of claims 1-34, wherein the PKC comprises at least 6, 7, 8, 9, or 10 amino acid substitutions or deletions relative to SEQ ID NO: 1.

36. The host cell of any one of claims 1-35, wherein the PKC is capable of producing at least 10%, 20%, 30%, 40%, 50%, 60%, 70%, 80%, 90%, 100%, or more olivetolic acid relative to a control.

37. The host cell of claim 36, wherein the control is a PKC that does not comprise one or more of the amino acid substitutions or deletions.

38. A host cell that comprises a heterologous polynucleotide encoding a polyketide cyclase (PKC), wherein the PKC comprises an amino acid substitution at a residue corresponding to position 13, 17, 18, 22, 26, 31, 33, 39, 52, 55, 64, 65, 66, 70, 71, 74, 80, 82, 83, 84, 85, 88, and/or 98 in SEQ ID NO: 1.

39. The host cell of claim 38, wherein the PKC comprises:
a) the amino acid R at a residue corresponding to position 13 in SEQ ID NO:1;
b) the amino acid N at a residue corresponding to position 17 in SEQ ID NO:1;
c) the amino acid D at a residue corresponding to position 18 in SEQ ID NO:1;
d) the amino acid K at a residue corresponding to position 22 in SEQ ID NO:1;
e) the amino acid R at a residue corresponding to position 26 in SEQ ID NO:1;
f) the amino acid L at a residue corresponding to position 31 in SEQ ID NO:1;
g) the amino acid R, H or N at a residue corresponding to position 33 in SEQ ID NO:1;
h) the amino acid G at a residue corresponding to position 39 in SEQ ID NO:1;
i) the amino acid H at a residue corresponding to position 52 in SEQ ID NO:1;
j) the amino acid F at a residue corresponding to position 55 in SEQ ID NO:1;
k) the amino acid D at a residue corresponding to position 64 in SEQ ID NO:1;
l) the amino acid N at a residue corresponding to position 65 in SEQ ID NO:1;
m) the amino acid Y at a residue corresponding to position 66 in SEQ ID NO:1;
n) the amino acid A at a residue corresponding to position 70 in SEQ ID NO:1;
o) the amino acid S or E at a residue corresponding to position 71 in SEQ ID NO:1;
p) the amino acid R at a residue corresponding to position 82 in SEQ ID NO: 1;
q) the amino acid G at a residue corresponding to position 74 in SEQ ID NO:1;
r) the amino acid A at a residue corresponding to position 80 in SEQ ID NO:1;
s) the amino acid E, A, K, or N at a residue corresponding to position 83 in SEQ ID NO:1;
t) the amino acid K or F at a residue corresponding to position 84 in SEQ ID NO:1;
u) the amino acid F at a residue corresponding to position 85 in SEQ ID NO:1;
v) the amino acid N at a residue corresponding to position 88 in SEQ ID NO: 1; and/or
w) the amino acid K or Y at a residue corresponding to position 98 in SEQ ID NO:1.

40. The host cell of claim 38 or 39, wherein relative to SEQ ID NO: 1, the PKC comprises:
a) A18D, T26R, I33R, D39G, E52H, Y55F, E64D, Q70A, G80A, D83N, and V84K;
b) E17N, T26R, V31L, D71S, D83E, and V84F;
c) E17N, V31L, I33N, E64D, D71S, and V84F;
d) E17N, A18D, V31L, D71S, D83A, and V84F;
e) E17N, E22K, V31L, I33N, D71E, and V84F;
f) E17N, A18D, V31L, D71E, D83A, and V84F;
g) E17N, V31L, D71S, D83E, V84F, and T98Y;
h) V84K, T26R, D39G, D83E, T98K, and S65N;
i) E17N, A18D, V31L, I33N, D71S, D83E, and V84K;
j) E17N, A18D, V31L, D71S, I74G, D83E, and V84F;
k) E17N, V31L, I33N, D71S, V84K, and Y85F;
1) A18D, T26R, I33R, E52H, Y55F, V66Y, Q70A, G80A, D83N, V84K, and Y85F;
m) E17N, A18D, V31L, I33N, D71S, D83K, and V84K;
n) E17N, A18D, T26R, V31L, I33N, D71S, and V84K;
o) V84K, T26R, D39G, D13R, T98K, and S65N;
p) E17N, V31L, I33N, S65N, D71S, and V84K;
q) E17N, A18D, E22K, V31L, I33N, D71E, and V84F;
r) D13R, E17N, A18D, V31L, D71S, D83A, and V84K;
s) E17N, V31L, D39G, D71S, D83A, and V84K;
t) D13R, A18D, T26R, E52H, Y55F, Q70A, G80A, D83N, V84K, and Y85F;
u) E17N, A18D, T26R, V31L, D71S, D83A, and V84K;
v) E17N, V31L, I33N, D71S, G82R, and V84F;
w) E17N, V31L, I33N, D71S, V84K, and T98K;
x) V84K, T26R, D39G, D83E, D13R, and T98K;
y) V84K, T26R, D83E, D13R, T98K, and S65N;
z) E17N, V31L, I33N, V66Y, D71E, and V84F;
aa) E17N, A18D, V31L, I33N, D71E, and V84F;
bb) E17N, A18D, V31L, I33N, D71S, G80A, and V84F;
cc) A18D, T26R, E52H, Y55F, Q70A, G80A, D83N, V84K, Y85F, and F₈₈N;
dd) E17N, A18D, V31L, I33N, D71S, V84K, and T98K;
ee) E17N, A18D, V31L, I33N, S65N, D71S, and V84K;
ff) T26R, I33H, Y55F, Q70A, G80A, D83K, V84K, and F₈₈N;
gg) A18D, E22K, T26R, E52H, Y55F, Q70A, D71E, G80A, D83N, and V84K; or
hh) E17N, V31L, I33N, D71E, G82R, and V84F.

41. The host cell of any one of claims 38-40, wherein the PKC comprises a sequence that is at least 90% identical to any one of SEQ ID NOs: 255, 749, 751, 765, 768, 790, 808, 810, 822, 828, 840, 846, 857, 862, 865, 921, 922, 858, 850, 851, 933, 871, 809, 926, 923, 924, 758, 747, 757, 875, 908, 823, 833, and 777.

42. The host cell of claim 41, wherein the PKC comprises any one of SEQ ID NOs: 255, 749, 751, 765, 768, 790, 808, 810, 822, 828, 840, 846, 857, 862, 865, 921, 922, 858, 850, 851, 933, 871, 809, 926, 923, 924, 758, 747, 757, 875, 908, 823, 833, and 777.

43. The host cell of any one of claims 38-42, wherein the heterologous polynucleotide comprises a sequence that is at least 90% identical to any one of SEQ ID NOs: 448, 1116, 1118, 1132, 1135, 1157, 1175, 1177, 1189, 1195, 1207, 1213, 1224, 1229, 1232, 1288, 1289, 1225, 1217, 1218, 1300, 1238, 1176, 1293, 1290, 1291, 1125, 1114, 1124, 1242, 1275, 1190, 1200, and 1144.

44. The host cell of claim 43, wherein the heterologous polynucleotide comprises any one of SEQ ID NOs: 448, 1116, 1118, 1132, 1135, 1157, 1175, 1177, 1189, 1195, 1207, 1213, 1224, 1229, 1232, 1288, 1289, 1225, 1217, 1218, 1300, 1238, 1176, 1293, 1290, 1291, 1125, 1114, 1124, 1242, 1275, 1190, 1200, and 1144.

45. The host cell of claim 40, wherein relative to SEQ ID NO: 1, the PKC comprises A18D, T26R, I33R, D39G, E52H, Y55F, E64D, Q70A, G80A, D83N, and V84K.

46. The host cell of claim 40, wherein relative to SEQ ID NO: 1, the PKC comprises E17N, T26R, V31L, D71S, D83E, and V84F.

47. The host cell of claim 40, wherein relative to SEQ ID NO: 1, the PKC comprises E17N, V31L, I33N, E64D, D71S, and V84F.

48. The host cell of claim 40, wherein relative to SEQ ID NO: 1, the PKC comprises E17N, A18D, V31L, D71S, D83A, and V84F.

49. The host cell of claim 40, wherein relative to SEQ ID NO: 1, the PKC comprises E17N, E22K, V31L, I33N, D71E, and V84F.

50. The host cell of claim 40, wherein relative to SEQ ID NO: 1, the PKC comprises E17N, A18D, V31L, D71E, D83A, and V84F.

51. The host cell of claim 40, wherein relative to SEQ ID NO: 1, the PKC comprises E17N, V31L, D71S, D83E, V84F, and T98Y.

52. The host cell of claim 40, wherein relative to SEQ ID NO: 1, the PKC comprises V84K, T26R, D39G, D83E, T98K, and S65N.

53. The host cell of claim 40, wherein relative to SEQ ID NO: 1, the PKC comprises E17N, A18D, V31L, I33N, D71S, D83E, and V84K.

54. The host cell of claim 40, wherein relative to SEQ ID NO: 1, the PKC comprises E17N, A18D, V31L, D71S, I74G, D83E, and V84F.

55. The host cell of claim 40, wherein relative to SEQ ID NO: 1, the PKC comprises E17N, V31L, I33N, D71S, V84K, and Y85F.

56. The host cell of claim 40, wherein relative to SEQ ID NO: 1, the PKC comprises A18D, T26R, I33R, E52H, Y55F, V66Y, Q70A, G80A, D83N, V84K, and Y85F.

57. The host cell of claim 40, wherein relative to SEQ ID NO: 1, the PKC comprises E17N, A18D, V31L, I33N, D71S, D83K, and V84K.

58. The host cell of claim 40, wherein relative to SEQ ID NO: 1, the PKC comprises E17N, A18D, T26R, V31L, I33N, D71S, and V84K.

59. The host cell of claim 40, wherein relative to SEQ ID NO: 1, the PKC comprises V84K, T26R, D39G, D13R, T98K, and S65N.

60. The host cell of claim 40, wherein relative to SEQ ID NO: 1, the PKC comprises E17N, V31L, I33N, S65N, D71S, and V84K.

61. The host cell of claim 40, wherein relative to SEQ ID NO: 1, the PKC comprises E17N, A18D, E22K, V31L, I33N, D71E, and V84F.

62. The host cell of claim 40, wherein relative to SEQ ID NO: 1, the PKC comprises D13R, E17N, A18D, V31L, D71S, D83A, and V84K.

63. The host cell of claim 40, wherein relative to SEQ ID NO: 1, the PKC comprises E17N, V31L, D39G, D71S, D83A, and V84K.

64. The host cell of claim 40, wherein relative to SEQ ID NO: 1, the PKC comprises D13R, A18D, T26R, E52H, Y55F, Q70A, G80A, D83N, V84K, and Y85F.

65. The host cell of claim 40, wherein relative to SEQ ID NO: 1, the PKC comprises E17N, A18D, T26R, V31L, D71S, D83A, and V84K.

66. The host cell of claim 40, wherein relative to SEQ ID NO: 1, the PKC comprises E17N, V31L, I33N, D71S, G82R, and V84F.

67. The host cell of claim 40, wherein relative to SEQ ID NO: 1, the PKC comprises E17N, V31L, I33N, D71S, V84K, and T98K.

68. The host cell of claim 40, wherein relative to SEQ ID NO: 1, the PKC comprises V84K, T26R, D39G, D83E, D13R, and T98K.

69. The host cell of claim 40, wherein relative to SEQ ID NO: 1, the PKC comprises V84K, T26R, D83E, D13R, T98K, and S65N.

70. The host cell of claim 40, wherein relative to SEQ ID NO: 1, the PKC comprises E17N, V31L, I33N, V66Y, D71E, and V84F.

71. The host cell of claim 40, wherein relative to SEQ ID NO: 1, the PKC comprises E17N, A18D, V31L, I33N, D71E, and V84F.

72. The host cell of claim 40, wherein relative to SEQ ID NO: 1, the PKC comprises E17N, A18D, V31L, I33N, D71S, G80A, and V84F.

73. The host cell of claim 40, wherein relative to SEQ ID NO: 1, the PKC comprises A18D, T26R, E52H, Y55F, Q70A, G80A, D83N, V84K, Y85F, and F₈₈N.

74. The host cell of claim 40, wherein relative to SEQ ID NO: 1, the PKC comprises E17N, A18D, V31L, I33N, D71S, V84K, and T98K.

75. The host cell of claim 40, wherein relative to SEQ ID NO: 1, the PKC comprises E17N, A18D, V31L, I33N, S65N, D71S, and V84K.

76. The host cell of claim 40, wherein relative to SEQ ID NO: 1, the PKC comprises T26R, I33H, Y55F, Q70A, G80A, D83K, V84K, and F₈₈N.

77. The host cell of claim 40, wherein relative to SEQ ID NO: 1, the PKC comprises A18D, E22K, T26R, E52H, Y55F, Q70A, D71E, G80A, D83N, and V84K.

78. The host cell of claim 40, wherein relative to SEQ ID NO: 1, the PKC comprises E17N, V31L, 133N, D71E, G82R, and V84F.

79. A host cell that comprises a heterologous polynucleotide encoding a polyketide cyclase (PKC), wherein the PKC comprises at least 6 amino acid substitutions or deletions relative to SEQ ID NO: 1, wherein the PKC comprises at least two amino acid substitutions in a domain corresponding to helix 3 (positions 76-85 in SEQ ID NO: 1), and wherein the PKC is capable of producing olivetolic acid from 3,5,7-trioxododecanoyl-CoA.

80. The host cell of claim 79, wherein the at least two amino acid includes an amino acid substitution at position 84 relative to SEQ ID NO: 1.

81. The host cell of claim 79-80, wherein at least one of the at least two amino acid substitutions increases the stability of a kinked helix defined by the domains corresponding to (positions 66-73 in SEQ ID NO: 1), turn 1 (positions 74-75 in SEQ ID NO: 1), and helix 3 (positions 76-85 in SEQ ID NO: 1) and/or improves conformation of a binding pocket of the PKC to 3,5,7-trioxododecanoyl-CoA and/or olivetolic acid.

82. The host cell of any one of claims 79-81, wherein the at least two amino acid substitutions in the domain corresponding to helix 3 (positions 76-85 in SEQ ID NO: 1) are at residues corresponding to positions 80 and 82 in SEQ ID NO: 1.

83. The host cell of any one of claims 79-82, wherein the PKC comprises:
a) the amino acid E, A, or S at the residue corresponding to position 80 in SEQ ID NO: 1; and/or
b) the amino acid V or K at the residue corresponding to position 82 in SEQ ID NO: 1.

84. The host cell of any one of claims 79-83 wherein the PKC further comprises an amino acid substitution at a residue corresponding to position 73 or 74 in SEQ ID NO: 1.

85. The host cell of claim 84, wherein:
a) the PKC comprises the amino acid L at the residue corresponding to position 73 in SEQ ID NO: 1; and/or
b) the PKC comprises the amino acid S or L at the residue corresponding to position 74 in SEQ ID NO: 1.

86. The host cell of any one of claims 79-85, wherein the PKC comprises an amino acid substitution at a residue corresponding to any of positions position 84 and/or 86-89 in SEQ ID NO: 1.

87. The host cell of claim 86, wherein the PKC comprises:
a) the amino acid M at the residue corresponding to position 84 in SEQ ID NO: 1;
b) the amino acid G at the residue corresponding to position 86 in SEQ ID NO: 1;
c) the amino acid D at the residue corresponding to position 87 in SEQ ID NO: 1;
d) the amino acid Y at the residue corresponding to position 88 in SEQ ID NO: 1; and/or
e) the amino acid V at the residue corresponding to position 89 in SEQ ID NO: 1.

88. The host cell of any one of claims 79-87, wherein the host cell produces at least 10%, 20%, 30%, 40%, 50%, 60%, 70%, 80%, 90%, 100%, or more of the PKC relative to a control host cell.

89. The host cell of claim 88, wherein the control host cell does not comprise the PKC.

90. The host cell of any one of claims 79-89, wherein the PKC is capable of producing at least 10%, 20%, 30%, 40%, 50%, 60%, 70%, 80%, 90%, 100%, or more of olivetolic acid relative to a control.

91. The host cell of claim 90, wherein the control is a PKC that does not comprise one or more of the at least two amino acid substitutions in the domain corresponding to helix 3 (positions 76-85 in SEQ ID NO: 1).

92. The host cell of claim 5, wherein the PKC comprises one or more of the following:
a) the amino acid G at a residue corresponding to position 2 in SEQ ID NO: 1;
b) the amino acid M or Y at a residue corresponding to position 3 in SEQ ID NO: 1;
c) the amino acid R or K at a residue corresponding to position 13 in SEQ ID NO: 1;
d) the amino acid N at a residue corresponding to position 17 in SEQ ID NO: 1;
e) the amino acid D or R at a residue corresponding to position 18 in SEQ ID NO: 1;
f) the amino acid E or D at a residue corresponding to position 19 in SEQ ID NO: 1;
g) the amino acid A at a residue corresponding to position 20 in SEQ ID NO: 1;
h) the amino acid K at a residue corresponding to position 21 in SEQ ID NO: 1;
i) the amino acid T or K at a residue corresponding to position 22 in SEQ ID NO: 1;
j) the amino acid A or N at a residue corresponding to position 25 in SEQ ID NO: 1;
k) the amino acid H, R, A, or E at a residue corresponding to position 26 in SEQ ID NO: 1;
l) the amino acid A, S, E, or H at a residue corresponding to position 28 in SEQ ID NO: 1;
m) the amino acid D, S, E, or T at a residue corresponding to position 29 in SEQ ID NO: 1;
n) the amino acid L or A at a residue corresponding to position 31 in SEQ ID NO: 1;
o) the amino acid H, R, D, E, K, Q, or N at a residue corresponding to position 33 in SEQ ID NO: 1;
p) the amino acid L at a residue corresponding to position 37 in SEQ ID NO: 1;
q) the amino acid L at a residue corresponding to position 38 in SEQ ID NO: 1;
r) the amino acid G, S, or Q at a residue corresponding to position 39 in SEQ ID NO: 1;
s) the amino acid K or R at a residue corresponding to position 41 in SEQ ID NO: 1;
t) the amino acid I at a residue corresponding to position 45 in SEQ ID NO: 1;
u) the amino acid K at a residue corresponding to position 50 in SEQ ID NO: 1;
v) the amino acid H at a residue corresponding to position 52 in SEQ ID NO: 1;
w) the amino acid H at a residue corresponding to position 53 in SEQ ID NO: 1;
x) the amino acid F at a residue corresponding to position 55 in SEQ ID NO: 1;
y) the amino acid Y at a residue corresponding to position 56 in SEQ ID NO: 1;
z) the amino acid Y at a residue corresponding to position 57 in SEQ ID NO: 1;
aa) the amino acid I or L at a residue corresponding to position 60 in SEQ ID NO: 1;
bb) the amino acid M at a residue corresponding to position 62 in SEQ ID NO: 1;
cc) the amino acid Q or D at a residue corresponding to position 64 in SEQ ID NO: 1;
dd) the amino acid N at a residue corresponding to position 65 in SEQ ID NO: 1;
ee) the amino acid K at a residue corresponding to position 67 in SEQ ID NO: 1;
ff) the amino acid E, G, or H at a residue corresponding to position 68 in SEQ ID NO: 1;
gg) the amino acid A or L at a residue corresponding to position 70 in SEQ ID NO: 1;
hh) the amino acid Q or S, at a residue corresponding to position 71 in SEQ ID NO: 1;
ii) the amino acid D, E, H, or Q at a residue corresponding to position 74 in SEQ ID NO: 1;
jj) the amino acid A or G at a residue corresponding to position 83 in SEQ ID NO: 1;
kk) the amino acid F, K, M, or Q at a residue corresponding to position 84 in SEQ ID NO: 1;
ll) the amino acid A or F at a residue corresponding to position 85 in SEQ ID NO: 1;
mm) the amino acid G at a residue corresponding to position 86 in SEQ ID NO: 1;
nn) the amino acid D or K at a residue corresponding to position 87 in SEQ ID NO: 1;
oo) the amino acid Y, N, or S at a residue corresponding to position 88 in SEQ ID NO: 1;
pp) the amino acid M or I at a residue corresponding to position 95 in SEQ ID NO: 1;
qq) the amino acid F at a residue corresponding to position 97 in SEQ ID NO: 1;
rr) the amino acid E, K, or Y at a residue corresponding to position 98 in SEQ ID NO: 1;
the amino acid A, G, K, N, Q, or S at a residue corresponding to position 100 in SEQ ID NO: 1; and/or
ss) the amino acid A or E at a residue corresponding to position 101 in SEQ ID NO: 1.

93. The host cell of claim 92, wherein the PKC further comprises one or more of the following:
a) the amino acid M at a residue corresponding to position 24 in SEQ ID NO: 1;
b) the amino acid F at a residue corresponding to position 46 in SEQ ID NO: 1;
c) the amino acid A at a residue corresponding to position 48 in SEQ ID NO: 1;
d) the amino acid Q at a residue corresponding to position 49 in SEQ ID NO: 1;
e) the amino acid I or F at a residue corresponding to position 59 in SEQ ID NO: 1;
f) the amino acid T, D, or S at a residue corresponding to position 61 in SEQ ID NO: 1;
g) the amino acid L, M, or Y at a residue corresponding to position 66 in SEQ ID NO: 1;
h) the amino acid L or Y at a residue corresponding to position 69 in SEQ ID NO: 1;
i) the amino acid L at a residue corresponding to position 73 in SEQ ID NO: 1;
j) the amino acid S at a residue corresponding to position 74 in SEQ ID NO: 1;
k) the amino acid V, A, E, S, D, or N at a residue corresponding to position 80 in SEQ ID NO: 1;
l) the amino acid Y at a residue corresponding to position 81 in SEQ ID NO: 1;
m) the amino acid K, V, or R at a residue corresponding to position 82 in SEQ ID NO: 1;
n) the amino acid V or M at a residue corresponding to position 89 in SEQ ID NO: 1; and/or
o) the amino acid V at a residue corresponding to position 94 in SEQ ID NO: 1.

94. The host cell of claim 92 or 93, wherein the PKC comprises at least 6, 7, 8, 9, or 10 amino acid substitutions relative to SEQ ID NO: 1.

95. The host cell of any one of claims 90-94, wherein the PKC is capable of producing at least 10%, 20%, 30%, 40%, 50%, 60%, 70%, 80%, 90%, 100%, or more of olivetolic acid relative to a control.

96. The host cell of claim 95, wherein the control is a PKC that does not comprise an amino acid substitution at a residue corresponding to position 2, 3, 13, 17, 18, 19, 20, 21, 22, 25, 26, 28, 29, 31, 33, 37, 38, 39, 41, 45, 50, 52, 53, 55, 56, 57, 60, 62, 64, 65, 67, 68, 70, 71, 74, 83, 84, 85, 86, 87, 88, 95, 97, 98, 100, and/or 101 in SEQ ID NO: 1.

97. A host cell that comprises a heterologous polynucleotide encoding a polyketide cyclase (PKC), wherein the PKC comprises one or more of the following amino acid substitutions 17, 18, 29, 31, 33, 39, 71, 83, and/or 84 relative to SEQ ID NO: 1, and wherein the PKC is capable of producing olivetolic acid from 3,5,7-trioxododecanoyl-CoA.

98. The host cell of claim 97, wherein the PKC comprises one or more of the following amino acid substitutions E17N, A18D, N29T, V31L, I33N, D39Q, D71S, D83A, and/or V84F relative to SEQ ID NO: 1.

99. The host cell of claim 97 or 98, wherein the PKC comprises at least 6, 7, 8, 9, or 10 amino acid substitutions or deletions relative to SEQ ID NO: 1.

100. The host cell of any one of claims 97-99, wherein the PKC comprises:
a) E17N, A18D, V31L, D39Q, D71S, and D83A relative to SEQ ID NO: 1;
b) E17N, A18D, V31L, D71S, D83A, and V84F relative to SEQ ID NO: 1; or
c) A18D, V31L, D39Q, D71S, D83A, and V84F relative to SEQ ID NO: 1.

101. The host cell of claim 100, wherein the PKC comprises a sequence that is at least 90% identical to SEQ ID NO: 255, 220, or 707.

102. The host cell of claim 101, wherein the PKC comprises SEQ ID NO: 255, 220, 707.

103. The host cell of any one of claims 97-102, wherein the PKC produces more olivetolic acid as compared to a control PKC comprising SEQ ID NO: 1.

104. The host cell of any one of claims 97-103, wherein the PKC produces more than 41,000 μg/L olivetolic acid.

105. The host cell of any one of claims 97-104, wherein relative to a control PKC comprising SEQ ID NO: 1, the PKC produces a greater ratio of olivetolic acid to olivetol.

106. The host cell of any one of claims 97-105, wherein the PKC produces a ratio of olivetolic acid to olivetol that is higher than 3.1.

107. A host cell that comprises a heterologous polynucleotide encoding a polyketide cyclase (PKC), wherein the PKC comprises one or more amino acid substitutions relative to SEQ ID NO: 1 selected from the group consisting of:
a) D13R;
b) A18D;
c) E22K;
d) T26R or T26H;
e) N29S;
f) I33R or I33H;
g) D39G;
h) K49Q;
i) E52H;
j) Y55F;
k) Q70A or Q70L;
l) D71Q;
m) I74G;
n) G80A;
o) D83K or D83N;
p) V84K; and
q) Y85A,
wherein the PKC is capable of producing olivetolic acid from 3,5,7-trioxododecanoyl-CoA (4a).

108. The host cell of claim 107, wherein the PKC comprises at least 6, at least 7, at least 8, at least 9, or at least 10 amino acid substitutions or deletions relative to SEQ ID NO: 1.

109. The host cell of claim 107 or 108, wherein relative to SEQ ID NO: 1, the PKC comprises:
a) I33R, E52H, Y55F, Q70A, G80A, D83K, and V84K;
b) D13R, A18D, N29S, Q70L, D71Q, G80A, and D83K;
c) I33R, E52H, Y55F, Q70A, 174G, and D83K;
d) T26R, I33H, E52H, Y55F, Q70A, and D83K;
e) A18D, T26R, E52H, Y55F, Q70A, G80A, D83N, V84K, and Y85A;
f) T26R, I33H, Y55F, Q70A, G80A, D83K, and Y85A; or
g) E22K, T26H, N29S, D39G, K49Q, E52H, D83N, and V84K.

110. The host cell of claim 109, wherein the PKC comprises a sequence that is at least 90% identical to SEQ ID NO: 283, 289, 294, 344, 345, 349, or 365.

111. The host cell of claim 110, wherein the PKC comprises SEQ ID NO: 283, 289, 294, 344, 345, 349, or 365.

112. The host cell of any one of claims 107-111, wherein the PKC produces more olivetolic acid as compared to a control PKC comprising SEQ ID NO: 1.

113. The host cell of any one of claims 107-112, wherein the PKC produces more than 94,000 ug/L olivetolic acid.

114. The host cell of any one of claims 1-113, wherein the host cell is a plant cell, an algal cell, a yeast cell, a bacterial cell, or an animal cell.

115. The host cell of claim 114, wherein the host cell is a yeast cell.

116. The host cell of claim 115, wherein the yeast cell is a Saccharomyces cell, a Yarrowia cell, or a Komagataella cell.

117. The host cell of claim 116, wherein the Saccharomyces cell is a Saccharomyces cerevisiae cell.

118. The host cell of claim 116, wherein the yeast cell is a Yarrowia cell.

119. The host cell of claim 114, wherein the host cell is a bacterial cell.

120. The host cell of claim 119, wherein the bacterial cell is an E. coli cell.

121. The host cell of any one of claims 1-120, wherein the host cell further comprises one or more heterologous polynucleotides comprising one or more of: an acyl activating enzyme (AAE), a polyketide synthase (PKS), a prenyltransferase (PT), and/or a terminal synthase (TS).

122. The host cell of claim 121, wherein the polyketide synthase is an olivetol synthase (OLS).

123. The host cell of claim 121 or 122, wherein the terminal synthase is a cannabidiolic acid synthase (CBDAS).

124. The host cell of claim 121 or 122, wherein the terminal synthase is a tetrahydrocannabinolic acid synthase (THCAS).

125. The host cell of claim 121 or 122, wherein the terminal synthase is a cannabichromenic acid synthase (CBCAS).

126. A method comprising culturing the host cell of any one of claims 1-125.

127. A method for producing 2,4-dihydroxybenzoic acid optionally substituted at position 6 comprising contacting: a tetraketide with a polyketide cyclase (PKC), wherein the PKC comprises an amino acid substitution at one or more residues corresponding to one more or more positions selected from the group consisting of position 17, 18, 29, 31, 33, 39, 71, 83 and 84 in SEQ ID NO: 1.

128. The method of claim 127, wherein the PKC comprises at least 6, 7, 8, 9, or 10 amino acid substitutions or deletions relative to SEQ ID NO: 1.

129. The method of claim 127 or 128, wherein the tetraketide is 3,5,7-trioxododecanoyl-CoA.

130. The method of any one of claims 127-129, wherein the 2,4-dihydroxybenzoic acid optionally substituted at position 6 is olivetolic acid.

131. The method of any one of claims 127-130, wherein contacting the tetraketide with the PKC occurs in vitro.

132. The method of any one of claims 127-130, wherein contacting the tetraketide with the PKC occurs in vivo.

133. The method of any one of claims 127-132, wherein the PKC comprises at least six amino acid substitutions selected from the group consisting of E17N, A18D, N29T, V31L, I33N, D39Q, D71S, D83A, and V84F relative to SEQ ID NO: 1.

134. A non-naturally occurring nucleic acid encoding a polyketide cyclase (PKC), wherein the non-naturally occurring nucleic acid encodes a PKC comprising a sequence with at least one amino acid substitution relative to SEQ ID NO: 1 and with at least 90% identity to SEQ ID NO: 62, 87, 220, 234, 219, 258, 231, 240, 255, 707, 749, 751, 765, 768, 790, 808, 810, 822, 828, 840, 846, 857, 862, 865, 921, 922, 858, 850, 851, 933, 871, 809, 926, 923, 924, 758, 747, 757, 875, 908, 823, 833, or 777.

135. A non-naturally occurring nucleic acid encoding a polyketide cyclase (PKC) wherein relative to the sequence of SEQ ID NO: 1 the wherein the PKC comprises an amino acid substitution at one or more residues corresponding to one or more positions selected from the group consisting of position 17, 18, 29, 31, 33, 39, 71, 83 and 84 in SEQ ID NO: 1 and wherein the PKC is capable of producing olivetolic acid from 3,5,7-trioxododecanoyl-CoA.

136. The non-naturally occurring nucleic acid of claim 135, wherein the PKC comprises at least 6 amino acid substitutions or deletions relative to SEQ ID NO: 1.

137. A non-naturally occurring nucleic acid encoding a polyketide cyclase (PKC) wherein relative to the sequence of SEQ ID NO: 1, the PKC comprises an amino acid substitution at one or more residues corresponding to one or more positions selected from the group consisting of position 13, 17, 18, 22, 26, 31, 33, 39, 52, 55, 64, 65, 66, 70, 71, 74, 80, 82, 83, 84, 85, 88, and/or 98 in SEQ ID NO: 1 and wherein the PKC is capable of producing olivetolic acid from 3,5,7-trioxododecanoyl-CoA.

138. A vector comprising the non-naturally occurring nucleic acids of any one of claims 134-137.

139. An expression cassette comprising the non-naturally occurring nucleic acids of any one of claims 134-137.

140. A non-naturally occurring polyketide cyclase (PKC) wherein the PKC comprises an amino acid substitution at one or more residues corresponding to one or more positions selected from the group consisting of position 17, 18, 29, 31, 33, 39, 71, 83 and 84 in SEQ ID NO: 1, and wherein the PKC is capable of producing olivetolic acid from 3,5,7-trioxododecanoyl-CoA.

141. A non-naturally occurring polyketide cyclase (PKC) wherein the PKC comprises an amino acid substitution at one or more residues corresponding to one or more positions selected from the group consisting of position 13, 17, 18, 22, 26, 31, 33, 39, 52, 55, 64, 65, 66, 70, 71, 74, 80, 82, 83, 84, 85, 88, and/or 98 in SEQ ID NO: 1, and wherein the PKC is capable of producing olivetolic acid from 3,5,7-trioxododecanoyl-CoA.

142. The non-naturally occurring PKC of claim 140, wherein the PKC comprises at least 6, 7, 8, 9, or 10 amino acid substitutions or deletions relative to SEQ ID NO: 1.

143. A host cell comprising the non-naturally occurring nucleic acid of any one of claims 134-137, the vector of claim 138, the expression cassette of claim 139 or the non-naturally occurring PKC of any one of claims 140-142.

144. A host cell that comprises a heterologous polynucleotide encoding a polyketide cyclase (PKC), wherein the PKC comprises one or more amino acid substitutions relative to SEQ ID NO: 1 selected from the group consisting of:
a) A2G;
b) V3M or V3Y;
c) D13R or D13K;
d) E17N;
e) A18D or A18R;
f) Q19E or Q19D;
g) K20A;
h) E21K;
i) E22T or E22K;
j) K25A or K25N;
k) T26H, T26R, T26A, or T26E;
l) V28A, V28S, V28E, or V28H;
m) N29D, N29S, N29E, or N29T;
n) V31L or V31A;
o) 133H, 133R, 133D, 133E, 133K, 133Q, or 133N;
p) M37L;
q) K38L;
r) D39G, D39S, or D39Q;
s) Y41K or Y41R;
t) D45I;
u) N50K;
v) E52H;
w) E53H;
x) Y55F;
y) T56Y;
z) H₅₇Y;
aa) E601 or E60L;
bb) T62M;
cc) E64Q or E64D;
dd) S65N;
ee) E67K;
ff) T68E, T68G, or T68H;
gg) Q70A or Q70L;
hh) D71Q or D71S;
ii) 174D, 174E, 174H, or 174Q;
jj) D83A or D83G;
kk) V84F, V84K, V84M, or V84Q;
ll) Y85A or Y85F;
mm) R86G;
nn) S87C, S87D, or S87K;
oo) F₈₈Y, F₈₈N, or F₈₈S;
pp) F₉₅M or F₉₅I;
qq) Y97F;
rr) T98E, T98K, or T98Y;
ss) R100A, R100G, R100K, R100N, R100Q, or R100S; and
tt) K101A or K101E.

145. The host cell of claim 144, wherein the PKC further comprises one or more of the following amino acid substitutions relative to SEQ ID NO: 1:
a) F₂₄M;
b) V46F;
c) Q48A;
d) K49Q;
e) N50F or N50W;
f) V59I or V59F;
g) V61T, V61D, or V61S;
h) V66L, V66M, or V66Y;
i) 169L or 169Y;
j) D71E;
k) I73L;
l) 174S, 174G, or 174L;
m) G80V, G80A, G80E, G80S, G80D, or G80N;
n) F₈₁Y;
o) G82K, G82V, or G82R;
p) D83E, D83K, D83N, D83Q, D83R, or D83S;
q) R86N or R86S;
r) W89V or W89M; and/or
s) I94V.

146. The host cell of claim 144 or 145, wherein the PKC comprises at least 6, 7, 8, 9, or 10 amino acid substitutions or deletions relative to SEQ ID NO: 1.

The application's sequence listing, which the Patent Office published only in electronic form, follows.

SEQUENCE LISTING (1316 sequences)

SEQ ID NO: 1 - protein, 101 aa, Cannabis sativa
MAVKHLIVLKFKDEITEAQKEEFFKTYVNLVNIIPAMKDVYWGKDVTQKNKEEGYTHIVEVTFESVETIQDYIIHPAHVGFGDVYRSFWEKLLIFDYTPRK

SEQ ID NO: 2 - DNA, 303 bp, Cannabis sativa
atggcagtgaagcatttgattgtattgaagttcaaagatgaaatcacagaagcccaaaaggaagaatttttcaagacgtatgtgaatcttgtgaatatcatcccagccatgaaagatgtatactggggtaaagatgtgactcaaaagaataaggaagaagggtacactcacatagttgaggtaacatttgagagtgtggagactattcaggactacattattcatcctgcccatgttggatttggagatgtctatcgttctttctgggaaaaacttctcatttttgactacacaccacgaaag

SEQ ID NO: 3 - DNA, 306 bp, Artificial Sequence
  Synthetic
atggccgtcaagcatctgattgtattgaaatttaaggacgagatcacggaagcacaaaaggaagaatttttcaaaacttatgttaatttagttaacataatccctgctatgaaggatgtctactggggtaaggatgtgacacagaaaaacaaggaagaaggctacactcacattgtggaagttaccttcgagagcgttgaaactattcaagactacatcatccaccccgctcatgtcggattcggtgatgtctatcgttccttttgggaaaaattgttgattttcgactataccccaagaaagtaa

SEQ ID NO: 4 - protein, 545 aa, Cannabis sativa
MNCSTFSFWFVCKIIFFFLSFNIQISIANPQENFLKCFSEYIPNNPANPKFIYTQHDQLYMSVLNSTIQNLRFTSDTTPKPLVIVTPSNVSHIQASILCSKKVGLQIRTRSGGHDAEGLSYISQVPFAIVDLRNMHTVKVDIHSQTAWVEAGATLGEVYYWINEMNENFSFPGGYCPTVGVGGHFSGGGYGALMRNYGLAADNIIDAHLVNVDGKVLDRKSMGEDLFWAIRGGGGENFGIIAACKIKLVVVPSKATIFSVKKNMEIHGLVKLFNKWQNIAYKYDKDLMLTTHFRTRNITDNHGKNKTTVHGYFSSIFLGGVDSLVDLMNKSFPELGIKKTDCKELSWIDTTIFYSGVVNYNTANFKKEILLDRSAGKKTAFSIKLDYVKKLIPETAMVKILEKLYEEEVGVGMYVLYPYGGIMDEISESAIPFPHRAGIMYELWYTATWEKQEDNEKHINWVRSVYNFTTPYVSQNPRLAYLNYRDLDLGKTNPESPNNYTQARIWGEKYFGKNFNRLVKVKTKADPNNFFRNEQSIPPLPPRHH

SEQ ID NO: 5 - protein, 719 aa, Unknown
  acyl activating enzyme (AAE)
MGKNYKSLDSVVASDFIALGITSEVAETLHGRLAEIVCNYGAATPQTWINIANHILSPDLPFSLHQMLFYGCYKDFGPAPPAWIPDPEKVKSTNLGALLEKRGKEFLGVKYKDPISSFSHFQEFSVRNPEVYWRTVLMDEMKISFSKDPECILRRDDINNPGGSEWLPGGYLNSAKNCLNVNSNKKLNDTMIVWRDEGNDDLPLNKLTLDQLRKRVWLVGYALEEMGLEKGCAIAIDMPMHVDAVVIYLAIVLAGYVVVSIADSFSAPEISTRLRLSKAKAIFTQDHIIRGKKRIPLYSRVVEAKSPMAIVIPCSGSNIGAELRDGDISWDYFLERAKEFKNCEFTAREQPVDAYTNILFSSGTTGEPKAIPWTQATPLKAAADGWSHLDIRKGDVIVWPTNLGWMMGPWLVYASLLNGASIALYNGSPLVSGFAKFVQDAKVTMLGVVPSIVRSWKSTNCVSGYDWSTIRCFSSSGEASNVDEYLWLMGRANYKPVIEMCGGTEIGGAFSAGSFLQAQSLSSFSSQCMGCTLYILDKNGYPMPKNKPGIGELALGPVMFGASKTLLNGNHHDVYFKGMPTLNGEVLRRHGDIFELTSNGYYHAHGRADDTMNIGGIKISSIEIERVCNEVDDRVFETTAIGVPPLGGGPEQLVIFFVLKDSNDTTIDLNQLRLSFNLGLQKKLNPLFKVTRVVPLSSLPRTATNKIMRRVLRQFSHFE

SEQ ID NO: 6 - protein, 543 aa, Unknown
  acyl activating enzyme (AAE)
MEKSGYGRDGIYRSLRPPLHLPNNNNLSMVSFLFRNSSSYPQKPALIDSETNQILSFSHFKSTVIKVSHGFLNLGIKKNDVVLIYAPNSIHFPVCFLGIIASGAIATTSNPLYTVSELSKQVKDSNPKLIITVPQLLEKVKGFNLPTILIGPDSEQESSSDKVMTFNDLVNLGGSSGSEFPIVDDFKQSDTAALLYSSGTTGMSKGVVLTHKNFIASSLMVTMEQDLVGEMDNVFLCFLPMFHVFGLAIITYAQLQRGNTVISMARFDLEKMLKDVEKYKVTHLWVVPPVILALSKNSMVKKFNLSSIKYIGSGAAPLGKDLMEECSKVVPYGIVAQGYGMTETCGIVSMEDIRGGKRNSGSAGMLASGVEAQIVSVDTLKPLPPNQLGEIWVKGPNMMQGYFNNPQATKLTIDKKGWVHTGDLGYFDEDGHLYVVDRIKELIKYKGFQVAPAELEGLLVSHPEILDAVVIPFPDAEAGEVPVAYVVRSPNSSLTENDVKKFIAGQVASFKRLRKVTFINSVPKSASGKILRRELIQKVRSNM

SEQ ID NO: 7 - protein, 385 aa, Cannabis sativa
MNHLRAEGPASVLAIGTANPENILLQDEFPDYYFRVTKSEHMTQLKEKFRKICDKSMIRKRNCFLNEEHLKQNPRLVEHEMQTLDARQDMLVVEVPKLGKDACAKAIKEWGQPKSKITHLIFTSASTTDMPGADYHCAKLLGLSPSVKRVMMYQLGCYGGGTVLRIAKDIAENNKGARVLAVCCDIMACLFRGPSESDLELLVGQAIFGDGAAAVIVGAEPDESVGERPIFELVSTGQTILPNSEGTIGGHIREAGLIFDLHKDVPMLISNNIEKCLIEAFTPIGISDWNSIFWITHPGGKAILDKVEEKLHLKSDKFVDSRHVLSEHGNMSSSTVLFVMDELRKRSLEEGKSTTGDGFEWGVLFGFGPGLTVERVVVRSVPIKY

SEQ ID NO: 8 - protein, 307 aa, Cannabis sativa [sequence omitted]

SEQ ID NO: 9 - DNA, 924 bp, Artificial Sequence
  Synthetic
atgtcagaagccgcagatgtcgaaagagtttacgccgctatggaagaagccgccggtttgttaggtgttgcctgtgccagagataagatctacccattgttgtctacttttcaagatacattagttgaaggtggttcagttgttgttttctctatggcttcaggtagacattctacagaattggatttctctatctcagttccaacatcacatggtgatccatacgctactgttgttgaaaaaggtttatttccagcaacaggtcatccagttgatgatttgttggctgatactcaaaagcatttgccagtttctatgtttgcaattgatggtgaagttactggtggtttcaagaaaacttacgctttctttccaactgataacatgccaggtgttgcagaattatctgctattccatcaatgccaccagctgttgcagaaaatgcagaattatttgctagatacggtttggataaggttcaaatgacatctatggattacaagaaaagacaagttaatttgtacttttctgaattatcagcacaaactttggaagctgaatcagttttggcattagttagagaattgggtttacatgttccaaacgaattgggtttgaagttttgtaaaagatctttctcagtttatccaactttaaactgggaaacaggcaagatcgatagattatgtttcgcagttatctctaacgatccaacattggttccatcttcagatgaaggtgatatcgaaaagtttcataactacgctactaaagcaccatatgcttacgttggtgaaaagagaacattagtttatggtttgactttatcaccaaaggaagaatactacaagttgggtgcttactaccacattaccgacgtacaaagaggtttattgaaagcattcgatagtttagaagactaa

SEQ ID NO: 10 - protein, 395 aa, Cannabis sativa
MGLSSVCTFSFQTNYHTLLNPHNNNPKTSLLCYRHPKTPIKYSYNNFPSKHCSTKSFHLQNKCSESLSIAKNSIRAATTNQTEPPESDNHSVATKILNFGKACWKLQRPYTIIAFTSCACGLFGKELLHNTNLISWSLMFKAFFFLVAILCIASFTTTINQIYDLHIDRINKPDLPLASGEISVNTAWIMSIIVALFGLIITIKMKGGPLYIFGYCFGIFGGIVYSVPPFRWKQNPSTAFLLNFLAHIITNFTFYYASRAALGLPFELRPSFTFLLAFMKSMGSALALIKDASDVEGDTKFGISTLASKYGSRNLTLFCSGIVLLSYVAAILAGIIWPQAFNSNVMLLSHAILAFWLILQTRDFALTNYDPEAGRRFYEFMWKLYYAEYLVYVFI

SEQ ID NO: 11 - protein, 398 aa, Cannabis sativa
MGLSLVCTFSFQTNYHTLLNPHNKNPKNSLLSYQHPKTPIIKSSYDNFPSKYCLTKNFHLLGLNSHNRISSQSRSIRAGSDQIEGSPHHESDNSIATKILNFGHTCWKLQRPYVVKGMISIACGLFGRELFNNRHLFSWGLMWKAFFALVPILSFNFFAAIMNQIYDVDIDRINKPDLPLVSGEMSIETAWILSIIVALTGLIVTIKLKSAPLFVFIYIFGIFAGFAYSVPPIRWKQYPFTNFLITISSHVGLAFTSYSATTSALGLPFVWRPAFSFIIAFMTVMGMTIAFAKDISDIEGDAKYGVSTVATKLGARNMTFVVSGVLLLNYLVSISIGIIWPQVFKSNIMILSHAILAFCLIFQTRELALANYASAPSRQFFEFIWLLYYAEYFVYVFI

SEQ ID NO: 12 - protein, 323 aa, Artificial Sequence
  Synthetic
MSAGSDQIEGSPHHESDNSIATKILNFGHTCWKLQRPYVVKGMISIACGLFGRELFNNRHLFSWGLMWKAFFALVPILSFNFFAAIMNQIYDVDIDRINKPDLPLVSGEMSIETAWILSIIVALTGLIVTIKLKSAPLFVFIYIFGIFAGFAYSVPPIRWKQYPFTNFLITISSHVGLAFTSYSATTSALGLPFVWRPAFSFIIAFMTVMGMTIAFAKDISDIEGDAKYGVSTVATKLGARNMTFVVSGVLLLNYLVSISIGIIWPQVFKSNIMILSHAILAFCLIFQTRELALANYASAPSRQFFEFIWLLYYAEYFVYVFI

SEQ ID NO: 13 - protein, 545 aa, Cannabis sativa
MNCSAFSFWFVCKIIFFFLSFNIQISIANPQENFLKCFSEYIPNNPANPKFIYTQHDQLYMSVLNSTIQNLRFTSDTTPKPLVIVTPSNVSHIQASILCSKKVGLQIRTRSGGHDAEGMSYISQVPFVVVDLRNMHSIKIDVHSQTAWVEAGATLGEVYYWINEKNENFSFPGGYCPTVGVGGHFSGGGYGALMRNYGLAADNIIDAHLVNVDGKVLDRKSMGEDLFWAIRGGGGENFGIIAAWKIKLVAVPSKSTIFSVKKNMEIHGLVKLFNKWQNIAYKYDKDLVLMTHFITKNITDNHGKNKTTVHGYFSSIFHGGVDSLVDLMNKSFPELGIKKTDCKEFSWIDTTIFYSGVVNFNTANFKKEILLDRSAGKKTAFSIKLDYVKKPIPETAMVKILEKLYEEDVGVGMYVLYPYGGIMEEISESAIPFPHRAGIMYELWYTASWEKQEDNEKHINWVRSVYNFTTPYVSQNPRLAYLNYRDLDLGKTNPESPNNYTQARIWGEKYFGKNFNRLVKVKTKADPNNFFRNEQSIPPLPPHHH

SEQ ID NO: 14 - protein, 517 aa, Artificial Sequence
  Synthetic
NPQENFLKCFSEYIPNNPANPKFIYTQHDQLYMSVLNSTIQNLRFTSDTTPKPLVIVTPSNVSHIQASILCSKKVGLQIRTRSGGHDAEGMSYISQVPFVVVDLRNMHSIKIDVHSQTAWVEAGATLGEVYYWINEKNENFSFPGGYCPTVGVGGHFSGGGYGALMRNYGLAADNIIDAHLVNVDGKVLDRKSMGEDLFWAIRGGGGENFGIIAAWKIKLVAVPSKSTIFSVKKNMEIHGLVKLFNKWQNIAYKYDKDLVLMTHFITKNITDNHGKNKTTVHGYFSSIFHGGVDSLVDLMNKSFPELGIKKTDCKEFSWIDTTIFYSGVVNFNTANFKKEILLDRSAGKKTAFSIKLDYVKKPIPETAMVKILEKLYEEDVGVGMYVLYPYGGIMEEISESAIPFPHRAGIMYELWYTASWEKQEDNEKHINWVRSVYNFTTPYVSQNPRLAYLNYRDLDLGKTNPESPNNYTQARIWGEKYFGKNFNRLVKVKTKADPNNFFRNEQSIPPLPPHHH

SEQ ID NO: 15 - DNA, 1551 bp, Artificial Sequence
  Synthetic
aacccgcaagaaaactttctaaaatgcttttctgaatacattcctaacaaccctgccaacccgaagtttatctacacacaacacgatcaattgtatatgagcgtgttgaatagtacaatacagaacctgaggtttacatccgacacaacgccgaaaccgctagtgatcgtcacaccctccaacgtaagccacattcaggcaagcattttatgcagcaagaaagtcggactgcagataaggacgaggtccggaggacacgacgccgaagggatgagctatatctcccaggtaccttttgtggtggtagacttgagaaatatgcactctatcaagatagacgttcactcccaaaccgcttgggttgaggcgggagccacccttggtgaggtctactactggatcaacgaaaagaatgaaaattttagctttcctgggggatattgcccaactgtaggtgttggcggccacttctcaggaggcggttatggggccttgatgcgtaactacggacttgcggccgacaacattatagacgcacatctagtgaatgtagacggcaaagttttagacaggaagagcatgggtgaggatcttttttgggcaattagaggcggagggggagaaaattttggaattatcgctgcttggaaaattaagctagttgcggtaccgagcaaaagcactatattctctgtaaaaaagaacatggagatacatggtttggtgaagctttttaataagtggcaaaacatcgcgtacaagtacgacaaagatctggttctgatgacgcattttataacgaaaaatatcaccgacaaccacggaaaaaacaaaaccacagtacatggctacttctctagtatatttcatgggggagtcgattctctggttgatttaatgaacaaatcattcccagagttgggtataaagaagacagactgtaaggagttctcttggattgacacaactatattctattcaggcgtagtcaactttaacacggcgaatttcaaaaaagagatccttctggacagatccgcaggtaagaaaactgcgttctctatcaaattggactatgtgaagaagcctattcccgaaaccgcgatggtcaagatacttgagaaattatacgaggaagatgtgggagttggaatgtacgtactttatccctatggtgggataatggaagaaatcagcgagagcgccattccatttccccatcgtgccggcatcatgtacgagctgtggtatactgcgagttgggagaagcaagaagacaacgaaaagcacattaactgggtcagatcagtttacaatttcaccaccccatacgtgtcccagaatccgcgtctggcttacttgaactaccgtgatcttgacctgggtaaaacgaacccggagtcacccaacaattacactcaagctagaatctggggagagaaatactttgggaagaacttcaacaggttagtaaaggttaaaaccaaggcagatccaaacaacttttttagaaatgaacaatccattcccccgctacccccgcaccatcac

SEQ ID NO: 16 - protein, 545 aa, Cannabis sativa
MNCSAFSFWFVCKIIFFFLSFHIQISIANPRENFLKCFSKHIPNNVANPKLVYTQHDQLYMSILNSTIQNLRFISDTTPKPLVIVTPSNNSHIQATILCSKKVGLQIRTRSGGHDAEGMSYISQVPFVVVDLRNMHSIKIDVHSQTAWVEAGATLGEVYYWINEKNENLSFPGGYCPTVGVGGHFSGGGYGALMRNYGLAADNIIDAHLVNVDGKVLDRKSMGEDLFWAIRGGGGENFGIIAAWKIKLVAVPSKSTIFSVKKNMEIHGLVKLFNKWQNIAYKYDKDLVLMTHFITKNITDNHGKNKTTVHGYFSSIFHGGVDSLVDLMNKSFPELGIKKTDCKEFSWIDTTIFYSGVVNFNTANFKKEILLDRSAGKKTAFSIKLDYVKKPIPETAMVKILEKLYEEDVGAGMYVLYPYGGIMEEISESAIPFPHRAGIMYELWYTASWEKQEDNEKHINWVRSVYNFTTPYVSQNPRLAYLNYRDLDLGKTNHASPNNYTQARIWGEKYFGKNFNRLVKVKTKVDPNNFFRNEQSIPPLPPHHH

SEQ ID NO: 17 - protein, 544 aa, Cannabis sativa
MKCSTFSFWFVCKIIFFFFSFNIQTSIANPRENFLKCFSQYIPNNATNLKLVYTQNNPLYMSVLNSTIHNLRFTSDTTPKPLVIVTPSHVSHIQGTILCSKKVGLQIRTRSGGHDSEGMSYISQVPFVIVDLRNMRSIKIDVHSQTAWVEAGATLGEVYYWVNEKNENLSLAAGYCPTVCAGGHFGGGGYGPLMRNYGLAADNIIDAHLVNVHGKVLDRKSMGEDLFWALRGGGAESFGIIVAWKIRLVAVPKSTMFSVKKIMEIHELVKLVNKWQNIAYKYDKDLLLMTHFITRNITDNQGKNKTAIHTYFSSVFLGGVDSLVDLMNKSFPELGIKKTDCRQLSWIDTIIFYSGVVNYDTDNFNKEILLDRSAGQNGAFKIKLDYVKKPIPESVFVQILEKLYEEDIGAGMYALYPYGGIMDEISESAIPFPHRAGILYELWYICSWEKQEDNEKHLNWIRNIYNFMTPYVSKNPRLAYLNYRDLDIGINDPKNPNNYTQARIWGEKYFGKNFDRLVKVKTLVDPNNFFRNEQSIPPLPRHRH

SEQ ID NO: 18 - skipped

SEQ ID NO: 19 - protein, 101 aa, Artificial Sequence
  Synthetic
MAVKHLIVLKFKDEITEDQKEKFFKTYVSLVNIIPAMKDVYWGKDVTQKNKEHGYTHIVEVTFESVETILDYIIHPAHVGFKAVYRKYWEKLLIFDYTPRK

SEQ ID NO: 20 - protein, 101 aa, Artificial Sequence
  Synthetic
MAVKHLIVLKFKREITEDQKEKFFKTYVSLVNIIPAMKDVYWGKDVTQKNKEHGYTHIVEVTFESVETILDYIIHPAHVGFKAVYRKYWEKLLIFDYTPRK

SEQ ID NO: 21 - protein, 101 aa, Artificial Sequence
  Synthetic
MAVKHLIVLKFKDEITERQKEKFFKTYVSLVNIIPAMKDVYWGKDVTQKNKEHGYTHIVEVTFESVETILDYIIHPAHVGFKAVYRKYWEKLLIFDYTPRK

SEQ ID NO: 22 - protein, 101 aa, Artificial Sequence
  Synthetic
MAVKHLIVLKFKDEITEDQAEKFFKTYVSLVNIIPAMKDVYWGKDVTQKNKEHGYTHIVEVTFESVETILDYIIHPAHVGFKAVYRKYWEKLLIFDYTPRK

SEQ ID NO: 23 - protein, 101 aa, Artificial Sequence
  Synthetic
MAVKHLIVLKFKDEITEDQKEKFMKTYVSLVNIIPAMKDVYWGKDVTQKNKEHGYTHIVEVTFESVETILDYIIHPAHVGFKAVYRKYWEKLLIFDYTPRK

SEQ ID NO: 24 - protein, 101 aa, Artificial Sequence
  Synthetic
MAVKHLIVLKFKDEITEDQKEKFFKHYVSLVNIIPAMKDVYWGKDVTQKNKEHGYTHIVEVTFESVETILDYIIHPAHVGFKAVYRKYWEKLLIFDYTPRK

SEQ ID NO: 25 - protein, 101 aa, Artificial Sequence
  Synthetic
MAVKHLIVLKFKDEITEDQKEKFFKRYVSLVNIIPAMKDVYWGKDVTQKNKEHGYTHIVEVTFESVETILDYIIHPAHVGFKAVYRKYWEKLLIFDYTPRK

SEQ ID NO: 26 - protein, 101 aa, Artificial Sequence
  Synthetic
MAVKHLIVLKFKDEITEDQKEKFFKTYVSLVNHIPAMKDVYWGKDVTQKNKEHGYTHIVEVTFESVETILDYIIHPAHVGFKAVYRKYWEKLLIFDYTPRK

SEQ ID NO: 27 - protein, 101 aa, Artificial Sequence
  Synthetic
MAVKHLIVLKFKDEITEDQKEKFFKTYVSLVNRIPAMKDVYWGKDVTQKNKEHGYTHIVEVTFESVETILDYIIHPAHVGFKAVYRKYWEKLLIFDYTPRK

SEQ ID NO: 28 - protein, 101 aa, Artificial Sequence
  Synthetic
MAVKHLIVLKFKDEITEDQKEKFFKTYVSLVNIIPAMKDVYWGKDVTQKKKEHGYTHIVEVTFESVETILDYIIHPAHVGFKAVYRKYWEKLLIFDYTPRK

SEQ ID NO: 29 - protein, 101 aa, Artificial Sequence
  Synthetic
MAVKHLIVLKFKDEITEDQKEKFFKTYVSLVNIIPAMKDVYWGKDVTQKNKHHGYTHIVEVTFESVETILDYIIHPAHVGFKAVYRKYWEKLLIFDYTPRK

SEQ ID NO: 30 - protein, 101 aa, Artificial Sequence
  Synthetic
MAVKHLIVLKFKDEITEDQKEKFFKTYVSLVNIIPAMKDVYWGKDVTQKNKEHGYTHIVEVTFESVETILDYIIHPAHVGFKKVYRKYWEKLLIFDYTPRK

SEQ ID NO: 31 - protein, 101 aa, Artificial Sequence
  Synthetic
MAVKHLIVLKFKDEITEDQKEKFFKTYVSLVNIIPAMKDVYWGKDVTQKNKEHGYTHIVEVTFESVETILDYIIHPAHVVFKAVYRKYWEKLLIFDYTPRK

SEQ ID NO: 32 - protein, 101 aa, Artificial Sequence; identical to SEQ ID NO: 30
  Synthetic

SEQ ID NO: 33 - protein, 101 aa, Artificial Sequence
  Synthetic
MAVKHLIVLKFKDEITEDQKEKFFKTYVSLVNIIPAMKDVYWGKDVTQKNKEHGYTHIVEVTFESVETILDYIIHPAHVGFKRVYRKYWEKLLIFDYTPRK

SEQ ID NO: 34 - protein, 101 aa, Artificial Sequence
  Synthetic
MAVKHLIVLKFKDEITEDQKEKFFKTYVSLVNIIPAMKDVYWGKDVTQKNKEHGYTHIVEVTFESVETILDYIIHPAHVGFKAFYRKYWEKLLIFDYTPRK

SEQ ID NO: 35 - protein, 101 aa, Artificial Sequence
  Synthetic
MAVKHLIVLKFKDEITEDQKEKFFKTYVSLVNIIPAMKDVYWGKDVTQKNKEHGYTHIVEVTFESVETILDYIIHPAHVGFKAKYRKYWEKLLIFDYTPRK

SEQ ID NO: 36 - protein, 101 aa, Artificial Sequence
  Synthetic
MAVKHLIVLKFKDEITEDQKEKFFKTYVSLVNIIPAMKDVYWGKDVTQKNKEHGYTHIVEVTFESVETILDYIIHPAHVGFKAVARKYWEKLLIFDYTPRK

SEQ ID NO: 37 - protein, 101 aa, Artificial Sequence; identical to SEQ ID NO: 20
  Synthetic

SEQ ID NO: 38 - protein, 101 aa, Artificial Sequence; identical to SEQ ID NO: 21
  Synthetic

SEQ ID NO: 39 - protein, 101 aa, Artificial Sequence; identical to SEQ ID NO: 22
  Synthetic

SEQ ID NO: 40 - protein, 101 aa, Artificial Sequence; identical to SEQ ID NO: 24
  Synthetic

SEQ ID NO: 41 - protein, 101 aa, Artificial Sequence; identical to SEQ ID NO: 25
  Synthetic

SEQ ID NO: 42 - protein, 101 aa, Artificial Sequence; identical to SEQ ID NO: 26
  Synthetic

SEQ ID NO: 43 - protein, 101 aa, Artificial Sequence; identical to SEQ ID NO: 27
  Synthetic

SEQ ID NO: 44 - protein, 101 aa, Artificial Sequence; identical to SEQ ID NO: 28
  Synthetic

SEQ ID NO: 45 - protein, 101 aa, Artificial Sequence; identical to SEQ ID NO: 29
  Synthetic

SEQ ID NO: 46 - protein, 101 aa, Artificial Sequence
  Synthetic
MAVKHLIVLKFKDEITEDQKEKFFKTYVSLVNIIPAMKDVYWGKDVTQKNKEHGYYHIVEVTFESVETILDYIIHPAHVGFKAVYRKYWEKLLIFDYTPRK

SEQ ID NO: 47 - protein, 101 aa, Artificial Sequence; identical to SEQ ID NO: 31
  Synthetic

SEQ ID NO: 48 - protein, 101 aa, Artificial Sequence; identical to SEQ ID NO: 30
  Synthetic

SEQ ID NO: 49 - protein, 101 aa, Artificial Sequence; identical to SEQ ID NO: 33
  Synthetic

SEQ ID NO: 50 - protein, 101 aa, Artificial Sequence; identical to SEQ ID NO: 34
  Synthetic

SEQ ID NO: 51 - protein, 101 aa, Artificial Sequence; identical to SEQ ID NO: 35
  Synthetic

SEQ ID NO: 52 - protein, 101 aa, Artificial Sequence; identical to SEQ ID NO: 36
  Synthetic

SEQ ID NO: 53 - protein, 100 aa, Artificial Sequence
  Synthetic
MVKHLIVLKFKDEITEDQKEKFFKTYVSLVNIIPAMKDVYWGKDVTQKNKEHGYTHIVEVTFESVETILDYIIHPAHVGFKAVYRKYWEKLLIFDYTPRK

SEQ ID NO: 54 - protein, 101 aa, Artificial Sequence
  Synthetic
MAVKHLIVLKFKDEITERQAEKFFKRYVSLVNRIPAMKDVYWGKDVTQKKKEHGYYHIVEVTFESVETILDYIIHPAHVGFKKKARKYWEKLLIFDYTPRK

SEQ ID NO: 55 - protein, 101 aa, Artificial Sequence; identical to SEQ ID NO: 54
  Synthetic

SEQ ID NO: 56 - protein, 101 aa, Artificial Sequence; identical to SEQ ID NO: 54
  Synthetic

SEQ ID NO: 57 - protein, 101 aa, Artificial Sequence; identical to SEQ ID NO: 54
  Synthetic

SEQ ID NO: 58 - protein, 101 aa, Artificial Sequence
  Synthetic
MAVKHLIVLKFKDEITEDQKEKFFKTYVSLVNIIPAMKDVYWGKDVTQKNKEHGYTHIVEVTFESVETILDYIIHPAHVGFKAVYRCYWEKLLIFDYTPRK

SEQ ID NO: 59 - protein, 101 aa, Artificial Sequence; identical to SEQ ID NO: 58
  Synthetic

SEQ ID NO: 60 - protein, 101 aa, Artificial Sequence
  Synthetic
MAVKHLIVLKFKDEITEDQKEKFFKTYVSLVNIIPAMKDVYWGKDVTQKNKEHGYTHIVEVMFESVETILDYIIHPAHVGFKAVYRKYWEKLLIFDYTPRK

SEQ ID NO: 61 - protein, 101 aa, Artificial Sequence
  Synthetic
MAVKHLIVLKFKDEITEDQKEKFFKAYESLVNIIPAMKDVYWGKDVTQKNKEHGYTHIVIVTFESVETILDYIIHPAHVGFKAVYRKFWEKLLIFDYTPRK

SEQ ID NO: 62 - protein, 101 aa, Artificial Sequence
  Synthetic
MAVKHLIVLKFKDEITEDQKEKFFKAYVSLVNIIPAMKDVYWGKDVTQKNKEHGYTYIVEVTFESVETILDYIIHPAHVGFKAVYRKFWEKLLIFDYTPRK

SEQ ID NO: 63 - protein, 101 aa, Artificial Sequence
  Synthetic
MAVKHLIVLKFKDEITEDQKEEFFNAYVSLVNIIPAMKDVYWGKDVTQKNKEHGYTHIVIVTFESVETILDYIIHPAHVGFKAVYRKFWEKLLIFDYTPRK

SEQ ID NO: 64 - protein, 101 aa, Artificial Sequence
  Synthetic
MAVKHLIVLKFKDEITEDQKEEFFNAYVSLVNIIPAMKDVYWGKDVTQKNKEHGYTHIVIVTFESVETILDYIIHPAHVGFKAVYRKYWEKLLIFDYTPRK

SEQ ID NO: 65 - protein, 101 aa, Artificial Sequence
  Synthetic
MAVKHLIVLKFKDEITEDQKEEFFKTYVSLVNIIPAMKDVYWGKDVTQKNKEHGYTHIVEVTFESVETILDYIIHPAHVGFKAVYRSYWEKLLIFDYTPRK

SEQ ID NO: 66 - protein, 101 aa, Artificial Sequence
  Synthetic
MAVKHLIVLKFKDEITEDQKEEFFKAYESLVNIIPAMKDVYWGKDVTQKNKEHGYTHIVIVTFESVETILDYIIHPAHVGFKAVYRKFWEKLLIFDYTPRK

SEQ ID NO: 67 - protein, 101 aa, Artificial Sequence
  Synthetic
MAVKHLIVLKFKDEITEDQKEKFFKAYVSLVNIIPAMKDVYWGKDVTQKNKEHGYTHIVEVTFESVETILDYIIHPAHVGFKAVYRSYWEKLLIFDYTPRK

SEQ ID NO: 68 - protein, 101 aa, Artificial Sequence
  Synthetic
MAVKHLIVLKFKDEITEDQKEEFFKAYVSLVNIIPAMKDVYWGKDVTQKNKEHGYTHIVEVTFESVETILDYIIHPAHVGFKAVYRSYWEKLLIFDYTPRK

SEQ ID NO: 69 - protein, 101 aa, Artificial Sequence
  Synthetic
MAVKHLIVLKFKDEITEDQKEEFFKTYVSLVNIIPAMKDVYWGKDVTQKNKEHGYTYIVEVTFESVETILDYIIHPAHVGFKAVYRKYWEKLLIFDYTPRK

SEQ ID NO: 70 - protein, 101 aa, Artificial Sequence
  Synthetic
MAVKHLIVLKFKDEITEDQKEEFFKAYESLVNIIPAMKDVYWGKDVTQKNKEHGYTHIVIVTFESVETILDYIIHPAHVGFKAVYRSYWEKLLIFDYTPRK

SEQ ID NO: 71 - protein, 101 aa, Artificial Sequence
  Synthetic
MAVKHLIVLKFKDEITEDQKEEFFKAYESLVNIIPAMKDVYWGKDVTQKNKEHGYTHIVEVTFESVETILDYIIHPAHVGFKAVYRKYWEKLLIFDYTPRK

SEQ ID NO: 72 - protein, 101 aa, Artificial Sequence
  Synthetic
MAVKHLIVLKFKDEITEDQKEEFFKTYVSLVNIIPAMKDVYWGKDVTQKNKEHGYTHIVIVTFESVETILDYIIHPAHVGFKAVYRSYWEKLLIFDYTPRK

SEQ ID NO: 73 - protein, 101 aa, Artificial Sequence
  Synthetic
MAVKHLIVLKFKDEITEDQKEEFFKAYVSLVNIIPAMKDVYWGKDVTQKNKEHGYTHIVIVTFESVETILDYIIHPAHVGFKAVYRKFWEKLLVFDYTPRK

SEQ ID NO: 74 - protein, 101 aa, Artificial Sequence
  Synthetic
MAVKHLIVLKFKDEITEDQKEKFFKTYVSLVNIIPAMKDVYWGKDVTQKNKEHGYTHIVIVTFESVETILDYIIHPAHVGFKAVYRKYWEKLLIFDYTPRK

SEQ ID NO: 75 - protein, 101 aa, Artificial Sequence
  Synthetic
MAVKHLIVLKFKDEITEDQKEKFFKTYVSLVNIIPAMKDVYWGKDVTQKNKEHGYTHIVEVTFESVETILDYIIHPAHVGFKAVYRKFWEKLLIFDYTPRK

SEQ ID NO: 76 - protein, 101 aa, Artificial Sequence
  Synthetic
MAVKHLIVLKFKDEITEDQKEEFFKTYVSLVNIIPAMKDVYWGKDVTQKNKEHGYTHIVIVTFESVETILDYIIHPAHVGFKAVYRKYWEKLLIFDYTPRK

SEQ ID NO: 77 - protein, 101 aa, Artificial Sequence
  Synthetic
MAVKHLIVLKFKDEITEDQKEEFFKAYVSLVNIIPAMKDVYWGKDVTQKNKEHGYTHIVIVTFESVETILDYIIHPAHVGFKAVYRKYWEKLLIFDYTPRK

SEQ ID NO: 78 - protein, 101 aa, Artificial Sequence
  Synthetic
MAVKHLIVLKFKDEITEDQKEKFFKAYVSLVNIIPAMKDVYWGKDVTQKNKEHGYTHIVEVTFESVETILDYIIHPAHVGFKAVYRKFWEKLLIFDYTPRK

SEQ ID NO: 79 - protein, 101 aa, Artificial Sequence
  Synthetic
MAVKHLIVLKFKDEITEDQKEEFFKTYVSLVNIIPAMKDVYWGKDVTQKNKEHGYTHIVIVTFESVETILDYIIHPAHVGFKAVYRKFWEKLLIFDYTPRK

SEQ ID NO: 80 - protein, 101 aa, Artificial Sequence
  Synthetic
MAVKHLIVLKFKDEITEDQKEEFFKAYVSLVNIIPAMKDVYWGKDVTQKNKEHGYTHIVIVTFESVETILDYIIHPAHVGFKAVYRKFWEKLLIFDYTPRK

SEQ ID NO: 81 - protein, 101 aa, Artificial Sequence
  Synthetic
MAVKHLIVLKFKDEITEDQKEEFFKAYVSLVNIIPAMKDVYWGKDVTQKNKEHGYTHIVEVTFESVETILDYIIHPAHVGFKAVYRKFWEKLLIFDYTPRK

SEQ ID NO: 82 - protein, 101 aa, Artificial Sequence
  Synthetic
MAVKHLIVLKFKDEITEDQKEKFFKAYESLVNIIPAMKDVYWGKDVTQKNKEHGYTHIVIVTFESVETILDYIIHPAHVGFKAVYRKYWEKLLIFDYTPRK

SEQ ID NO: 83 - protein, 101 aa, Artificial Sequence
  Synthetic
MAVKHLIVLKFKDEITEDQKEKFFKAYVSLVNIIPAMKDVYWGKDVTQKNKEHGYTHIVIVTFESVETILDYIIHPAHVGFKAVYRSYWEKLLIFDYTPRK

SEQ ID NO: 84 - protein, 101 aa, Artificial Sequence
  Synthetic
MAVKHLIVLKFKDEITEDQKEEFFKAYVSLVNIIPAMKDVYWGKDVTQKNKEHGYTHIVIVTFESVETILDYIIHPAHVGFKAVYRSYWEKLLIFDYTPRK

SEQ ID NO: 85 - protein, 101 aa, Artificial Sequence
  Synthetic
MAVKHLIVLKFKDEITEDQKEKFFKTYVSLVNIIPAMKDVYWGKDVTQKNKEHGYTYIVIVTFESVETILDYIIHPAHVGFKAVYRKFWEKLLIFDYTPRK

SEQ ID NO: 86 - protein, 101 aa, Artificial Sequence
  Synthetic
MAVKHLIVLKFKDEITEDQKEEFFKTYESLVNIIPAMKDVYWGKDVTQKNKEHGYTHIVIVTFESVETILDYIIHPAHVGFKAVYRKFWEKLLIFDYTPRK

SEQ ID NO: 87 - protein, 101 aa, Artificial Sequence
  Synthetic
MAVKHLIVLKFKDEITEDQKEKFFNAYVSLVNIIPAMKDVYWGKDVTQKNKEHGYTHIVEVTFESVETILDYIIHPAHVGFKAVYRKFWEKLLIFDYTPRK

SEQ ID NO: 88 - protein, 101 aa, Artificial Sequence
  Synthetic
MAVKHLIVLKFKDEITEDQKEEFFNAYVSLVNIIPAMKDVYWGKDVTQKNKEHGYTHIVIVTFESVETILDYIIHPAHVGFKAVYRSYWEKLLIFDYTPRK

SEQ ID NO: 89 - protein, 101 aa, Artificial Sequence
  Synthetic
MAVKHLIVLKFKDEITEDQKEKFFNAYVSLVNIIPAMKDVYWGKDVTQKNKEHGYTHIVIVTFESVETILDYIIHPAHVGFKAVYRKFWEKLLIFDYTPRK

SEQ ID NO: 90 - protein, 101 aa, Artificial Sequence
  Synthetic
MAVKHLIVLKFKDEITEDQKEEFFKAYVSLVNIIPAMKDVYWGKDVTQKNKEHGYTHIVIVTFESVETILDYIIHPAHVGFKAVYRSFWEKLLIFDYTPRK

SEQ ID NO: 91 - protein, 101 aa, Artificial Sequence
  Synthetic
MAVKHLIVLKFKDEITEDQKEKFFKAYVSLVNIIPAMKDVYWGKDVTQKNKEHGYTHIVEVTFESVETILDYIIHPAHVGFKAVYRKYWEKLLIFDYTPRK

SEQ ID NO: 92 - protein, 101 aa, Artificial Sequence
  Synthetic
MAVKHLIVLKFKDEITEDQKEEFFKAYESLVNIIPAMKDVYWGKDVTQKNKEHGYTHIVEVTFESVETILDYIIHPAHVGFKAVYRKFWEKLLIFDYTPRK

SEQ ID NO: 93 - protein, 101 aa, Artificial Sequence
  Synthetic
MAVKHLIVLKFKDEITEDQKEKFFKAYESLVNIIPAMKDVYWGKDVTQKNKEHGYTHIVIVTFESVETILDYIIHPAHVGFKAVYRSYWEKLLIFDYTPRK

SEQ ID NO: 94 - protein, 101 aa, Artificial Sequence
  Synthetic
MAVKHLIVLKFKDEITEDQKEEFFKAYVSLVNIIPAMKDVYWGKDVTQKNKEHGYTHIVEVTFESVETILDYIIHPAHVGFKAVYRSFWEKLLIFDYTPRK

SEQ ID NO: 95 - protein, 101 aa, Artificial Sequence
  Synthetic
MAVKHLIVLKFKDEITEDQKEKFFNAYVSLVNIIPAMKDVYWGKDVTQKNKEHGYTHIVIVTFESVETILDYIIHPAHVGFKAVYRKYWEKLLIFDYTPRK

SEQ ID NO: 96 - protein, 101 aa, Artificial Sequence
  Synthetic
MAVKHLIVLKFKDEITEDQKEKFFKAYVELVNIIPAMKDVYWGKDVTQKNKEHGYTHIVIVTFESVETILDYIIHPAHVGFKAVYRKFWEKLLIFDYTPRK

SEQ ID NO: 97 - protein, 101 aa, Artificial Sequence
  Synthetic
MAVKHLIVLKFKDEITEDQKEKFFKAYVSLVNIIPAMKDVYWGKDVTQKNKEHGYTHIVEVTFESVETILDYIIHPAHVGFKAVYRSFWEKLLIFDYTPRK

SEQ ID NO: 98 - protein, 101 aa, Artificial Sequence
  Synthetic
MAVKHLIVLKFKDEITEDQKEKFFKAYVSLVNIIPAMKDVYWGKDVTQKNKEHGYTHIVIVTFESVETILDYIIHPAHVGFKAVYRSFWEKLLIFDYTPRK

SEQ ID NO: 99 - protein, 101 aa, Artificial Sequence
  Synthetic
MAVKHLIVLKFKDEITEDQKEEFFKAYVSLVNIIPAMKDVYWGKDVTQKNKEHGYTHIVEVTFESVETILDYIIHPAHVGFKAVYRKYWEKLLIFDYTPRK

SEQ ID NO: 100 - protein, 101 aa, Artificial Sequence
  Synthetic
MAVKHLIVLKFKDEITEDQKEKFFKTYVSLVNIIPAMKDVYWGKDVTQKNKEHGYTHIVIVTFESVETILDYIIHPAHVGFKAVYRKFWEKLLIFDYTPRK

SEQ ID NO: 101 - protein, 101 aa, Artificial Sequence
  Synthetic
MAVKHLIVLKFKDEITEDQKEEFFKTYVSLVNIIPAMKDVYWGKDVTQKNKEHGYTHIVEVTFESVETILDYIIHPAHVGFKAVYRKFWEKLLIFDYTPRK

SEQ ID NO: 102 - protein, 101 aa, Artificial Sequence
  Synthetic
MAVKHLIVLKFKDEITEDQKEEFFKAYESLVNIIPAMKDVYWGKDVTQKNKEHGYTHIVIVTFESVETILDYIIHPAHVGFKAVYRKYWEKLLIFDYTPRK

SEQ ID NO: 103 - protein, 101 aa, Artificial Sequence
  Synthetic
MAVKHLIVLKFKDEITEDQKEKFFKAYVELVNIIPAMKDVYWGKDVTQKNKEHGYTHIVEVTFESVETILDYIIHPAHVGFKAVYRKFWEKLLIFDYTPRK

SEQ ID NO: 104 - protein, 101 aa, Artificial Sequence
  Synthetic
MAVKHLIVLKFKDEITEDQKEKFFKAYVSLVNIIPAMKDVYWGKDVTQKNKEHGYTHIVIVTFESVETILDYIIHPAHVGFKAVYRKFWEKLLIFDYTPRK

SEQ ID NO: 105 - protein, 101 aa, Artificial Sequence
  Synthetic
MAVKHLIVLKFKDEITEDQKEEFFKTYVSLVNIIPAMKDVYWGKDVTQKNKEHGYTHIVEVTFESVETILDYIIHPAHVGFKAVYRKYWEKLLIFDYTPRK

SEQ ID NO: 106 - protein, 101 aa, Artificial Sequence
  Synthetic
MAVKHLIVLKFKDEITEDQKEKFFNAYVSLVNIIPAMKDVYWGKDVTQKNKEHGYTHIVIVTFESVETILDYIIHPAHVGFKAVYRSYWEKLLIFDYTPRK

SEQ ID NO: 107 - DNA, 306 bp, Artificial Sequence
  Synthetic
atggcagtcaagcatctaatcgttttaaaatttaaggatgaaattacggaggaccaaaaagaaaagtttttcaagacatacgtatcacttgttaacataatcccagccatgaaggacgtgtattggggtaaagatgtcactcagaagaacaaggaacacggctacactcacattgttgaggtcaccttcgaaagcgttgaaaccatcttggactacattatccaccccgctcatgttggtttcaaagctgtctatagaaagtactgggaaaaattgttgatttttgactacactcctcgtaagtaa

SEQ ID NO: 108 - DNA, 306 bp, Artificial Sequence
  Synthetic
atggcagtcaagcatctaatcgttttaaaatttaagagagaaattacggaggaccaaaaagaaaagtttttcaagacatacgtatcacttgttaacataatcccagccatgaaggacgtgtattggggtaaagatgtcactcagaagaacaaggaacacggctacactcacattgttgaggtcaccttcgaaagcgttgaaaccatcttggactacattatccaccccgctcatgttggtttcaaagctgtctatagaaagtactgggaaaaattgttgatttttgactacactcctcgtaagtaa

SEQ ID NO: 109 - DNA, 306 bp, Artificial Sequence
  Synthetic
atggcagtcaagcatctaatcgttttaaaatttaaggatgaaattacggagagacaaaaagaaaagtttttcaagacatacgtatcacttgttaacataatcccagccatgaaggacgtgtattggggtaaagatgtcactcagaagaacaaggaacacggctacactcacattgttgaggtcaccttcgaaagcgttgaaaccatcttggactacattatccaccccgctcatgttggtttcaaagctgtctatagaaagtactgggaaaaattgttgatttttgactacactcctcgtaagtaa

SEQ ID NO: 110 - DNA, 306 bp, Artificial Sequence
  Synthetic
atggcagtcaagcatctaatcgttttaaaatttaaggatgaaattacggaggaccaagctgaaaagtttttcaagacatacgtatcacttgttaacataatcccagccatgaaggacgtgtattggggtaaagatgtcactcagaagaacaaggaacacggctacactcacattgttgaggtcaccttcgaaagcgttgaaaccatcttggactacattatccaccccgctcatgttggtttcaaagctgtctatagaaagtactgggaaaaattgttgatttttgactacactcctcgtaagtaa

SEQ ID NO: 111 - DNA, 306 bp, Artificial Sequence
  Synthetic
atggcagtcaagcatctaatcgttttaaaatttaaggatgaaattacggaggaccaaaaagaaaagtttatgaagacatacgtatcacttgttaacataatcccagccatgaaggacgtgtattggggtaaagatgtcactcagaagaacaaggaacacggctacactcacattgttgaggtcaccttcgaaagcgttgaaaccatcttggactacattatccaccccgctcatgttggtttcaaagctgtctatagaaagtactgggaaaaattgttgatttttgactacactcctcgtaagtaa

SEQ ID NO: 112 - DNA, 306 bp, Artificial Sequence
  Synthetic
atggcagtcaagcatctaatcgttttaaaatttaaggatgaaattacggaggaccaaaaagaaaagtttttcaagcattacgtatcacttgttaacataatcccagccatgaaggacgtgtattggggtaaagatgtcactcagaagaacaaggaacacggctacactcacattgttgaggtcaccttcgaaagcgttgaaaccatcttggactacattatccaccccgctcatgttggtttcaaagctgtctatagaaagtactgggaaaaattgttgatttttgactacactcctcgtaagtaa

SEQ ID NO: 113 - DNA, 306 bp, Artificial Sequence
  Synthetic
atggcagtcaagcatctaatcgttttaaaatttaaggatgaaattacggaggaccaaaaagaaaagtttttcaagagatacgtatcacttgttaacataatcccagccatgaaggacgtgtattggggtaaagatgtcactcagaagaacaaggaacacggctacactcacattgttgaggtcaccttcgaaagcgttgaaaccatcttggactacattatccaccccgctcatgttggtttcaaagctgtctatagaaagtactgggaaaaattgttgatttttgactacactcctcgtaagtaa

SEQ ID NO: 114 - DNA, 306 bp, Artificial Sequence
  Synthetic
atggcagtcaagcatctaatcgttttaaaatttaaggatgaaattacggaggaccaaaaagaaaagtttttcaagacatacgtatcacttgttaaccatatcccagccatgaaggacgtgtattggggtaaagatgtcactcagaagaacaaggaacacggctacactcacattgttgaggtcaccttcgaaagcgttgaaaccatcttggactacattatccaccccgctcatgttggtttcaaagctgtctatagaaagtactgggaaaaattgttgatttttgactacactcctcgtaagtaa

SEQ ID NO: 115 - DNA, 306 bp, Artificial Sequence
  Synthetic
atggcagtcaagcatctaatcgttttaaaatttaaggatgaaattacggaggaccaaaaagaaaagtttttcaagacatacgtatcacttgttaacagaatcccagccatgaaggacgtgtattggggtaaagatgtcactcagaagaacaaggaacacggctacactcacattgttgaggtcaccttcgaaagcgttgaaaccatcttggactacattatccaccccgctcatgttggtttcaaagctgtctatagaaagtactgggaaaaattgttgatttttgactacactcctcgtaagtaa

SEQ ID NO: 116 - DNA, 306 bp, Artificial Sequence
  Synthetic
atggcagtcaagcatctaatcgttttaaaatttaaggatgaaattacggaggaccaaaaagaaaagtttttcaagacatacgtatcacttgttaacataatcccagccatgaaggacgtgtattggggtaaagatgtcactcagaagaaaaaggaacacggctacactcacattgttgaggtcaccttcgaaagcgttgaaaccatcttggactacattatccaccccgctcatgttggtttcaaagctgtctatagaaagtactgggaaaaattgttgatttttgactacactcctcgtaagtaa

SEQ ID NO: 117 - DNA, 306 bp, Artificial Sequence
  Synthetic
atggcagtcaagcatctaatcgttttaaaatttaaggatgaaattacggaggaccaaaaagaaaagtttttcaagacatacgtatcacttgttaacataatcccagccatgaaggacgtgtattggggtaaagatgtcactcagaagaacaagcatcacggctacactcacattgttgaggtcaccttcgaaagcgttgaaaccatcttggactacattatccaccccgctcatgttggtttcaaagctgtctatagaaagtactgggaaaaattgttgatttttgactacactcctcgtaagtaa

SEQ ID NO: 118 - DNA, 306 bp, Artificial Sequence
  Synthetic
atggcagtcaagcatctaatcgttttaaaatttaaggatgaaattacggaggaccaaaaagaaaagtttttcaagacatacgtatcacttgttaacataatcccagccatgaaggacgtgtattggggtaaagatgtcactcagaagaacaaggaacacggctactatcacattgttgaggtcaccttcgaaagcgttgaaaccatcttggactacattatccaccccgctcatgttggtttcaaagctgtctatagaaagtactgggaaaaattgttgatttttgactacactcctcgtaagtaa

SEQ ID NO: 119 - DNA, 306 bp, Artificial Sequence
  Synthetic
atggcagtcaagcatctaatcgttttaaaatttaaggatgaaattacggaggaccaaaaagaaaagtttttcaagacatacgtatcacttgttaacataatcccagccatgaaggacgtgtattggggtaaagatgtcactcagaagaacaaggaacacggctacactcacattgttgaggtcaccttcgaaagcgttgaaaccatcttggactacattatccaccccgctcatgttgttttcaaagctgtctatagaaagtactgggaaaaattgttgatttttgactacactcctcgtaagtaa

SEQ ID NO: 120 - DNA, 306 bp, Artificial Sequence
  Synthetic
atggcagtcaagcatctaatcgttttaaaatttaaggatgaaattacggaggaccaaaaagaaaagtttttcaagacatacgtatcacttgttaacataatcccagccatgaaggacgtgtattggggtaaagatgtcactcagaagaacaaggaacacggctacactcacattgttgaggtcaccttcgaaagcgttgaaaccatcttggactacattatccaccccgctcatgttggtttcaaaaaagtctatagaaagtactgggaaaaattgttgatttttgactacactcctcgtaagtaa

SEQ ID NO: 121 - DNA, 306 bp, Artificial Sequence
  Synthetic
atggcagtcaagcatctaatcgttttaaaatttaaggatgaaattacggaggaccaaaaagaaaagtttttcaagacatacgtatcacttgttaacataatcccagccatgaaggacgtgtattggggtaaagatgtcactcagaagaacaaggaacacggctacactcacattgttgaggtcaccttcgaaagcgttgaaaccatcttggactacattatccaccccgctcatgttggtttcaaaagagtctatagaaagtactgggaaaaattgttgatttttgactacactcctcgtaagtaa

SEQ ID NO: 122 - DNA, 306 bp, Artificial Sequence
  Synthetic
atggcagtcaagcatctaatcgttttaaaatttaaggatgaaattacggaggaccaaaaagaaaagtttttcaagacatacgtatcacttgttaacataatcccagccatgaaggacgtgtattggggtaaagatgtcactcagaagaacaaggaacacggctacactcacattgttgaggtcaccttcgaaagcgttgaaaccatcttggactacattatccaccccgctcatgttggtttcaaagctttttatagaaagtactgggaaaaattgttgatttttgactacactcctcgtaagtaa

SEQ ID NO: 123 - DNA, 306 bp, Artificial Sequence
  Synthetic
atggcagtcaagcatctaatcgttttaaaatttaaggatgaaattacggaggaccaaaaagaaaagtttttcaagacatacgtatcacttgttaacataatcccagccatgaaggacgtgtattggggtaaagatgtcactcagaagaacaaggaacacggctacactcacattgttgaggtcaccttcgaaagcgttgaaaccatcttggactacattatccaccccgctcatgttggtttcaaagctaaatatagaaagtactgggaaaaattgttgatttttgactacactcctcgtaagtaa

SEQ ID NO: 124 - DNA, 306 bp, Artificial Sequence
  Synthetic
atggcagtcaagcatctaatcgttttaaaatttaaggatgaaattacggaggaccaaaaagaaaagtttttcaagacatacgtatcacttgttaacataatcccagccatgaaggacgtgtattggggtaaagatgtcactcagaagaacaaggaacacggctacactcacattgttgaggtcaccttcgaaagcgttgaaaccatcttggactacattatccaccccgctcatgttggtttcaaagctgtcgctagaaagtactgggaaaaattgttgatttttgactacactcctcgtaagtaa

SEQ ID NO: 125 - DNA, 306 bp, Artificial Sequence
  Synthetic
atggcagtcaagcatctaatcgttttaaaatttaagagggaaattacggaggaccaaaaagaaaagtttttcaagacatacgtatcacttgttaacataatcccagccatgaaggacgtgtattggggtaaagatgtcactcagaagaacaaggaacacggctacactcacattgttgaggtcaccttcgaaagcgttgaaaccatcttggactacattatccaccccgctcatgttggtttcaaagctgtctatagaaagtactgggaaaaattgttgatttttgactacactcctcgtaagtaa

SEQ ID NO: 126 - DNA, 306 bp, Artificial Sequence
  Synthetic
atggcagtcaagcatctaatcgttttaaaatttaaggatgaaattacggagaggcaaaaagaaaagtttttcaagacatacgtatcacttgttaacataatcccagccatgaaggacgtgtattggggtaaagatgtcactcagaagaacaaggaacacggctacactcacattgttgaggtcaccttcgaaagcgttgaaaccatcttggactacattatccaccccgctcatgttggtttcaaagctgtctatagaaagtactgggaaaaattgttgatttttgactacactcctcgtaagtaa

SEQ ID NO: 127 - DNA, 306 bp, Artificial Sequence
  Synthetic
atggcagtcaagcatctaatcgttttaaaatttaaggatgaaattacggaggaccaagcagaaaagtttttcaagacatacgtatcacttgttaacataatcccagccatgaaggacgtgtattggggtaaagatgtcactcagaagaacaaggaacacggctacactcacattgttgaggtcaccttcgaaagcgttgaaaccatcttggactacattatccaccccgctcatgttggtttcaaagctgtctatagaaagtactgggaaaaattgttgatttttgactacactcctcgtaagtaa

SEQ ID NO: 128 - DNA, 306 bp, Artificial Sequence
  Synthetic
atggcagtcaagcatctaatcgttttaaaatttaaggatgaaattacggaggaccaaaaagaaaagtttttcaagcactacgtatcacttgttaacataatcccagccatgaaggacgtgtattggggtaaagatgtcactcagaagaacaaggaacacggctacactcacattgttgaggtcaccttcgaaagcgttgaaaccatcttggactacattatccaccccgctcatgttggtttcaaagctgtctatagaaagtactgggaaaaattgttgatttttgactacactcctcgtaagtaa

SEQ ID NO: 129 - DNA, 306 bp, Artificial Sequence
  Synthetic
atggcagtcaagcatctaatcgttttaaaatttaaggatgaaattacggaggaccaaaaagaaaagtttttcaagaggtacgtatcacttgttaacataatcccagccatgaaggacgtgtattggggtaaagatgtcactcagaagaacaaggaacacggctacactcacattgttgaggtcaccttcgaaagcgttgaaaccatcttggactacattatccaccccgctcatgttggtttcaaagctgtctatagaaagtactgggaaaaattgttgatttttgactacactcctcgtaagtaa

SEQ ID NO: 130 - DNA, 306 bp, Artificial Sequence
  Synthetic
atggcagtcaagcatctaatcgttttaaaatttaaggatgaaattacggaggaccaaaaagaaaagtttttcaagacatacgtatcacttgttaaccacatcccagccatgaaggacgtgtattggggtaaagatgtcactcagaagaacaaggaacacggctacactcacattgttgaggtcaccttcgaaagcgttgaaaccatcttggactacattatccaccccgctcatgttggtttcaaagctgtctatagaaagtactgggaaaaattgttgatttttgactacactcctcgtaagtaa

SEQ ID NO: 131 - DNA, 306 bp, Artificial Sequence
  Synthetic
atggcagtcaagcatctaatcgttttaaaatttaaggatgaaattacggaggaccaaaaagaaaagtttttcaagacatacgtatcacttgttaacaggatcccagccatgaaggacgtgtattggggtaaagatgtcactcagaagaacaaggaacacggctacactcacattgttgaggtcaccttcgaaagcgttgaaaccatcttggactacattatccaccccgctcatgttggtttcaaagctgtctatagaaagtactgggaaaaattgttgatttttgactacactcctcgtaagtaa

SEQ ID NO: 132 - DNA, 306 bp, Artificial Sequence
  Synthetic
atggcagtcaagcatctaatcgttttaaaatttaaggatgaaattacggaggaccaaaaagaaaagtttttcaagacatacgtatcacttgttaacataatcccagccatgaaggacgtgtattggggtaaagatgtcactcagaagaagaaggaacacggctacactcacattgttgaggtcaccttcgaaagcgttgaaaccatcttggactacattatccaccccgctcatgttggtttcaaagctgtctatagaaagtactgggaaaaattgttgatttttgactacactcctcgtaagtaa

SEQ ID NO: 133 - DNA, 306 bp, Artificial Sequence
  Synthetic
atggcagtcaagcatctaatcgttttaaaatttaaggatgaaattacggaggaccaaaaagaaaagtttttcaagacatacgtatcacttgttaacataatcccagccatgaaggacgtgtattggggtaaagatgtcactcagaagaacaagcaccacggctacactcacattgttgaggtcaccttcgaaagcgttgaaaccatcttggactacattatccaccccgctcatgttggtttcaaagctgtctatagaaagtactgggaaaaattgttgatttttgactacactcctcgtaagtaa

SEQ ID NO: 134 - DNA, 306 bp, Artificial Sequence
  Synthetic
atggcagtcaagcatctaatcgttttaaaatttaaggatgaaattacggaggaccaaaaagaaaagtttttcaagacatacgtatcacttgttaacataatcccagccatgaaggacgtgtattggggtaaagatgtcactcagaagaacaaggaacacggctactaccacattgttgaggtcaccttcgaaagcgttgaaaccatcttggactacattatccaccccgctcatgttggtttcaaagctgtctatagaaagtactgggaaaaattgttgatttttgactacactcctcgtaagtaa

SEQ ID NO: 135 - DNA, 306 bp, Artificial Sequence
  Synthetic
atggcagtcaagcatctaatcgttttaaaatttaaggatgaaattacggaggaccaaaaagaaaagtttttcaagacatacgtatcacttgttaacataatcccagccatgaaggacgtgtattggggtaaagatgtcactcagaagaacaaggaacacggctacactcacattgttgaggtcaccttcgaaagcgttgaaaccatcttggactacattatccaccccgctcatgttgtcttcaaagctgtctatagaaagtactgggaaaaattgttgatttttgactacactcctcgtaagtaa

SEQ ID NO: 136 - DNA, 306 bp, Artificial Sequence
  Synthetic
atggcagtcaagcatctaatcgttttaaaatttaaggatgaaattacggaggaccaaaaagaaaagtttttcaagacatacgtatcacttgttaacataatcccagccatgaaggacgtgtattggggtaaagatgtcactcagaagaacaaggaacacggctacactcacattgttgaggtcaccttcgaaagcgttgaaaccatcttggactacattatccaccccgctcatgttggtttcaaaaaggtctatagaaagtactgggaaaaattgttgatttttgactacactcctcgtaagtaa

SEQ ID NO: 137 - DNA, 306 bp, Artificial Sequence
  Synthetic
atggcagtcaagcatctaatcgttttaaaatttaaggatgaaattacggaggaccaaaaagaaaagtttttcaagacatacgtatcacttgttaacataatcccagccatgaaggacgtgtattggggtaaagatgtcactcagaagaacaaggaacacggctacactcacattgttgaggtcaccttcgaaagcgttgaaaccatcttggactacattatccaccccgctcatgttggtttcaaaagggtctatagaaagtactgggaaaaattgttgatttttgactacactcctcgtaagtaa

SEQ ID NO: 138 - DNA, 306 bp, Artificial Sequence
  Synthetic
atggcagtcaagcatctaatcgttttaaaatttaaggatgaaattacggaggaccaaaaagaaaagtttttcaagacatacgtatcacttgttaacataatcccagccatgaaggacgtgtattggggtaaagatgtcactcagaagaacaaggaacacggctacactcacattgttgaggtcaccttcgaaagcgttgaaaccatcttggactacattatccaccccgctcatgttggtttcaaagctttctatagaaagtactgggaaaaattgttgatttttgactacactcctcgtaagtaa

SEQ ID NO: 139 - DNA, 306 bp, Artificial Sequence
  Synthetic
atggcagtcaagcatctaatcgttttaaaatttaaggatgaaattacggaggaccaaaaagaaaagtttttcaagacatacgtatcacttgttaacataatcccagccatgaaggacgtgtattggggtaaagatgtcactcagaagaacaaggaacacggctacactcacattgttgaggtcaccttcgaaagcgttgaaaccatcttggactacattatccaccccgctcatgttggtttcaaagctaagtatagaaagtactgggaaaaattgttgatttttgactacactcctcgtaagtaa

SEQ ID NO: 140 - DNA, 306 bp, Artificial Sequence
  Synthetic
atggcagtcaagcatctaatcgttttaaaatttaaggatgaaattacggaggaccaaaaagaaaagtttttcaagacatacgtatcacttgttaacataatcccagccatgaaggacgtgtattggggtaaagatgtcactcagaagaacaaggaacacggctacactcacattgttgaggtcaccttcgaaagcgttgaaaccatcttggactacattatccaccccgctcatgttggtttcaaagctgtcgcaagaaagtactgggaaaaattgttgatttttgactacactcctcgtaagtaa

SEQ ID NO: 141 - DNA, 303 bp, Artificial Sequence
  Synthetic
atggtcaagcatctaatcgttttaaaatttaaggatgaaattacggaggaccaaaaagaaaagtttttcaagacatacgtatcacttgttaacataatcccagccatgaaggacgtgtattggggtaaagatgtcactcagaagaacaaggaacacggctacactcacattgttgaggtcaccttcgaaagcgttgaaaccatcttggactacattatccaccccgctcatgttggtttcaaagctgtctatagaaagtactgggaaaaattgttgatttttgactacactcctcgtaagtaa

SEQ ID NO: 142 - DNA, 306 bp, Artificial Sequence
  Synthetic
atggcagtcaagcatctaatcgttttaaaatttaaggatgaaattacggagcgtcaagccgaaaagtttttcaagagatacgtatcccttgttaacaggatcccagccatgaaggacgtgtattggggtaaagatgtcactcagaagaaaaaggaacacggctactatcacattgttgaggtcaccttcgaaagcgttgaaaccatcttggactacattatccaccccgctcatgttggtttcaaaaagaaagctagaaagtactgggaaaaattgttgatttttgactacactcctcgtaagtaa

SEQ ID NO: 143 - DNA, 306 bp, Artificial Sequence
  Synthetic
atggcagtcaagcatctaatcgttttaaaatttaaggatgaaattacggagagacaagccgaaaagtttttcaagcgttacgtatcacttgttaacaggatcccagccatgaaggacgtgtattggggtaaagatgtcactcagaagaaaaaggaacacggctactatcacattgttgaggtcaccttcgaaagcgttgaaaccatcttggactacattatccaccccgctcatgttggtttcaaaaagaaggctagaaagtactgggaaaaattgttgatttttgactacactcctcgtaagtaa

SEQ ID NO: 144 - DNA, 306 bp, Artificial Sequence
  Synthetic
atggcagtcaagcatctaatcgttttaaaatttaaggatgaaattacggagagacaagccgaaaagtttttcaagcgttacgtatcgcttgttaacaggatcccagccatgaaggacgtgtattggggtaaagatgtcactcagaagaaaaaggaacacggctactatcacattgttgaggtcaccttcgaaagcgttgaaaccatcttggactacattatccaccccgctcatgttggtttcaaaaagaaggctagaaagtactgggaaaaattgttgatttttgactacactcctcgtaagtaa

SEQ ID NO: 145 - DNA, 306 bp, Artificial Sequence
  Synthetic
atggcagtcaagcatctaatcgttttaaaatttaaggatgaaattacggagagacaagctgaaaaatttttcaagcgttacgtatctcttgttaacaggatcccagccatgaaggacgtgtattggggtaaagatgtcactcagaagaagaaggaacacggctactatcacattgttgaggtcaccttcgaaagcgttgaaaccatcttggactacattatccaccccgctcatgttggtttcaaaaagaaagctagaaagtactgggaaaaattgttgatttttgactacactcctcgtaagtaa

SEQ ID NO: 146 - DNA, 306 bp, Artificial Sequence
  Synthetic
atggcagtcaagcatctaatcgttttaaaatttaaggatgaaattacggaggaccaaaaagaaaagtttttcaagacatacgtatcacttgttaacataatcccagccatgaaggacgtgtattggggtaaagatgtcactcagaagaacaaggaacacggctacactcacattgttgaggtcaccttcgaaagcgttgaaaccatcttggactacattatccaccccgctcatgttggtttcaaagctgtctatagatgctactgggaaaaattgttgatttttgactacactcctcgtaagtaa

SEQ ID NO: 147 - DNA, 306 bp, Artificial Sequence
  Synthetic
atggcagtcaagcatctaatcgttttaaaatttaaggatgaaattacggaggaccaaaaagaaaagtttttcaagacatacgtatcacttgttaacataatcccagccatgaaggacgtgtattggggtaaagatgtcactcagaagaacaaggaacacggctacactcacattgttgaggtcaccttcgaaagcgttgaaaccatcttggactacattatccaccccgctcatgttggtttcaaagctgtctatagatgttactgggaaaaattgttgatttttgactacactcctcgtaagtaa

SEQ ID NO: 148 - DNA, 306 bp, Artificial Sequence
  Synthetic
atggcagtcaagcatctaatcgttttaaaatttaaggatgaaattacggaggaccaaaaagaaaagtttttcaagacatacgtatcacttgttaacataatcccagccatgaaggacgtgtattggggtaaagatgtcactcagaagaacaaggaacacggctacactcacattgttgaggtcatgttcgaaagcgttgaaaccatcttggactacattatccaccccgctcatgttggtttcaaagctgtctatagaaagtactgggaaaaattgttgatttttgactacactcctcgtaagtaa

SEQ ID NO: 149 - DNA, 306 bp, Artificial Sequence
  Synthetic
atggcagtcaagcatctaatcgttttaaaatttaaggatgaaattacggaggaccaaaaagaaaagtttttcaaggcctacgaatctcttgttaacataatcccagccatgaaggacgtgtattggggtaaagatgtcactcagaagaacaaggaacacggctacactcacattgttattgtcaccttcgaaagcgttgaaaccatcctggactacattatccaccccgctcatgttggtttcaaggctgtctatagaaaattctgggaaaaattgttgatttttgactacactcctcgtaagtaa

SEQ ID NO: 150 - DNA, 306 bp, Artificial Sequence
  Synthetic
atggcagtcaagcatctaatcgttttaaaatttaaggatgaaattacggaggaccaaaaagaaaagtttttcaaggcttacgtatcccttgttaacataatcccagccatgaaggacgtgtattggggtaaagatgtcactcagaagaacaaggaacacggctacacttatattgttgaggtcaccttcgaaagcgttgaaaccatcttggactacattatccaccccgctcatgttggtttcaaagctgtctatagaaagttctgggaaaaattgttgatttttgactacactcctcgtaagtaa

SEQ ID NO: 151 - DNA, 306 bp, Artificial Sequence
  Synthetic
atggcagtcaagcatctaatcgttttaaaatttaaggatgaaattacggaggaccaaaaagaagaatttttcaacgcttacgtatcccttgttaacataatcccagccatgaaggacgtgtattggggtaaagatgtcactcagaagaacaaggaacacggctacactcacattgttattgtcaccttcgaaagcgttgaaaccatcctggactacattatccaccccgctcatgttggtttcaaggctgtctatagaaaattctgggaaaaattgttgatttttgactacactcctcgtaagtaa

SEQ ID NO: 152 - DNA, 306 bp, Artificial Sequence
  Synthetic
atggcagtcaagcatctaatcgttttaaaatttaaggatgaaattacggaggaccaaaaagaagaatttttcaatgcttacgtatcccttgttaacataatcccagccatgaaggacgtgtattggggtaaagatgtcactcagaagaacaaggaacacggctacactcacattgttattgtcaccttcgaaagcgttgaaaccatcttggactacattatccaccccgctcatgttggtttcaaggctgtctatagaaaatactgggaaaaattgttgatttttgactacactcctcgtaagtaa

SEQ ID NO: 153 - DNA, 306 bp, Artificial Sequence
  Synthetic
atggcagtcaagcatctaatcgttttaaaatttaaggatgaaattacggaggaccaaaaagaagaatttttcaagacatacgtatcacttgttaacataatcccagccatgaaggacgtgtattggggtaaagatgtcactcagaagaacaaggaacacggctacactcacattgttgaggtcaccttcgaaagcgttgaaaccatcttggactacattatccaccccgctcatgttggtttcaaagctgtctatagatcatactgggaaaaattgttgatttttgactacactcctcgtaagtaa

SEQ ID NO: 154 - DNA, 306 bp, Artificial Sequence
  Synthetic
atggcagtcaagcatctaatcgttttaaaatttaaggatgaaattacggaggaccaaaaagaagaatttttcaaggcttacgaatcccttgttaacataatcccagccatgaaggacgtgtattggggtaaagatgtcactcagaagaacaaggaacacggctacactcacattgttattgtcaccttcgaaagcgttgaaaccatcctggactacattatccaccccgctcatgttggtttcaaggctgtctatagaaaattctgggaaaaattgttgatttttgactacactcctcgtaagtaa

SEQ ID NO: 155 - DNA, 306 bp, Artificial Sequence
  Synthetic
atggcagtcaagcatctaatcgttttaaaatttaaggatgaaattacggaggaccaaaaagaaaagtttttcaaggcttacgtatctcttgttaacataatcccagccatgaaggacgtgtattggggtaaagatgtcactcagaagaacaaggaacacggctacactcacattgttgaggtcaccttcgaaagcgttgaaaccatcttggactacattatccaccccgctcatgttggtttcaaggctgtctatagatcatactgggaaaaattgttgatttttgactacactcctcgtaagtaa

SEQ ID NO: 156 - DNA, 306 bp, Artificial Sequence
  Synthetic
atggcagtcaagcatctaatcgttttaaaatttaaggatgaaattacggaggaccaaaaagaagaatttttcaaggcctacgtatctcttgttaacataatcccagccatgaaggacgtgtattggggtaaagatgtcactcagaagaacaaggaacacggctacactcacattgttgaggtcaccttcgaaagcgttgaaaccatcttggactacattatccaccccgctcatgttggtttcaaagctgtctatagatcatactgggaaaaattgttgatttttgactacactcctcgtaagtaa

SEQ ID NO: 157 - DNA, 306 bp, Artificial Sequence
  Synthetic
atggcagtcaagcatctaatcgttttaaaatttaaggatgaaattacggaggaccaaaaagaagaatttttcaagacatacgtatctcttgttaacataatcccagccatgaaggacgtgtattggggtaaagatgtcactcagaagaacaaggaacacggctacacttatattgttgaggtcaccttcgaaagcgttgaaaccatcttggactacattatccaccccgctcatgttggtttcaaagctgtctatagaaagtactgggaaaaattgttgatttttgactacactcctcgtaagtaa

SEQ ID NO: 158 - DNA, 306 bp, Artificial Sequence
  Synthetic
atggcagtcaagcatctaatcgttttaaaatttaaggatgaaattacggaggaccaaaaagaagaatttttcaaggcttacgaatcccttgttaacataatcccagccatgaaggacgtgtattggggtaaagatgtcactcagaagaacaaggaacacggctacactcacattgttattgtcaccttcgaaagcgttgaaaccatcttggactacattatccaccccgctcatgttggtttcaaggctgtctatagatcatactgggaaaaattgttgatttttgactacactcctcgtaagtaa

SEQ ID NO: 159 - DNA, 306 bp, Artificial Sequence
  Synthetic
atggcagtcaagcatctaatcgttttaaaatttaaggatgaaattacggaggaccaaaaagaagaatttttcaaggcctacgaatcccttgttaacataatcccagccatgaaggacgtgtattggggtaaagatgtcactcagaagaacaaggaacacggctacactcacattgttgaggtcaccttcgaaagcgttgaaaccatcttggactacattatccaccccgctcatgttggtttcaaggctgtctatagaaagtactgggaaaaattgttgatttttgactacactcctcgtaagtaa

SEQ ID NO: 160 - DNA, 306 bp, Artificial Sequence
  Synthetic
atggcagtcaagcatctaatcgttttaaaatttaaggatgaaattacggaggaccaaaaagaagaatttttcaagacatacgtatctcttgttaacataatcccagccatgaaggacgtgtattggggtaaagatgtcactcagaagaacaaggaacacggctacactcacattgttattgtcaccttcgaaagcgttgaaaccatcttggactacattatccaccccgctcatgttggtttcaaggctgtctatagatcatactgggaaaaattgttgatttttgactacactcctcgtaagtaa

SEQ ID NO: 161 - DNA, 306 bp, Artificial Sequence
  Synthetic
atggcagtcaagcatctaatcgttttaaaatttaaggatgaaattacggaggaccaaaaagaagaatttttcaaggcctacgtatcacttgttaacataatcccagccatgaaggacgtgtattggggtaaagatgtcactcagaagaacaaggaacacggctacactcacattgttattgtcaccttcgaaagcgttgaaaccatcttggactacattatccaccccgctcatgttggtttcaaggctgtctatagaaaattctgggaaaaattgttggtctttgactacactcctcgtaagtaa

SEQ ID NO: 162 - DNA, 306 bp, Artificial Sequence
  Synthetic
atggcagtcaagcatctaatcgttttaaaatttaaggatgaaattacggaggaccaaaaagaaaagtttttcaagacatacgtatcccttgttaacataatcccagccatgaaggacgtgtattggggtaaagatgtcactcagaagaacaaggaacacggctacactcacattgttatcgtcaccttcgaaagcgttgaaaccatcttggactacattatccaccccgctcatgttggtttcaaagctgtctatagaaagtactgggaaaaattgttgatttttgactacactcctcgtaagtaa

SEQ ID NO: 163 - DNA, 306 bp, Artificial Sequence
  Synthetic
atggcagtcaagcatctaatcgttttaaaatttaaggatgaaattacggaggaccaaaaagaaaagtttttcaagacatacgtaagtcttgttaacataatcccagccatgaaggacgtgtattggggtaaagatgtcactcagaagaacaaggaacacggctacactcacattgttgaggtcaccttcgaaagcgttgaaaccatcctggactacattatccaccccgctcatgttggtttcaaagctgtctatagaaagttctgggaaaaattgttgatttttgactacactcctcgtaagtaa

SEQ ID NO: 164 - DNA, 306 bp, Artificial Sequence
  Synthetic
atggcagtcaagcatctaatcgttttaaaatttaaggatgaaattacggaggaccaaaaagaagaatttttcaagacatacgtatcacttgttaacataatcccagccatgaaggacgtgtattggggtaaagatgtcactcagaagaacaaggaacacggctacactcacattgttattgtcaccttcgaaagcgttgaaaccatcttggactacattatccaccccgctcatgttggtttcaaggctgtctatagaaaatactgggaaaaattgttgatttttgactacactcctcgtaagtaa

SEQ ID NO: 165 - DNA, 306 bp, Artificial Sequence
  Synthetic
atggcagtcaagcatctaatcgttttaaaatttaaggatgaaattacggaggaccaaaaagaagaatttttcaaggcttacgtatcgcttgttaacataatcccagccatgaaggacgtgtattggggtaaagatgtcactcagaagaacaaggaacacggctacactcacattgttattgtcaccttcgaaagcgttgaaaccatcttggactacattatccaccccgctcatgttggtttcaaggctgtctatagaaaatactgggaaaaattgttgatttttgactacactcctcgtaagtaa

SEQ ID NO: 166 - DNA, 306 bp, Artificial Sequence
  Synthetic
atggcagtcaagcatctaatcgttttaaaatttaaggatgaaattacggaggaccaaaaagaaaagtttttcaaggcctacgtatcccttgttaacataatcccagccatgaaggacgtgtattggggtaaagatgtcactcagaagaacaaggaacacggctacactcacattgttgaggtcaccttcgaaagcgttgaaaccatcctggactacattatccaccccgctcatgttggtttcaaagctgtctatagaaagttctgggaaaaattgttgatttttgactacactcctcgtaagtaa

SEQ ID NO: 167 - DNA, 306 bp, Artificial Sequence
  Synthetic
atggcagtcaagcatctaatcgttttaaaatttaaggatgaaattacggaggaccaaaaagaagaatttttcaagacatacgtatcacttgttaacataatcccagccatgaaggacgtgtattggggtaaagatgtcactcagaagaacaaggaacacggctacactcacattgttatcgtcaccttcgaaagcgttgaaaccatcttggactacattatccaccccgctcatgttggtttcaaggctgtctatagaaaattctgggaaaaattgttgatttttgactacactcctcgtaagtaa

SEQ ID NO: 168 - DNA, 306 bp, Artificial Sequence
  Synthetic
atggcagtcaagcatctaatcgttttaaaatttaaggatgaaattacggaggaccaaaaagaagaatttttcaaggcctacgtatcccttgttaacataatcccagccatgaaggacgtgtattggggtaaagatgtcactcagaagaacaaggaacacggctacactcacattgttatcgtcaccttcgaaagcgttgaaaccatcctggactacattatccaccccgctcatgttggtttcaaggctgtctatagaaaattctgggaaaaattgttgatttttgactacactcctcgtaagtaa

SEQ ID NO: 169 - DNA, 306 bp, Artificial Sequence
  Synthetic
atggcagtcaagcatctaatcgttttaaaatttaaggatgaaattacggaggaccaaaaagaagaatttttcaaggcttacgtatcgcttgttaacataatcccagccatgaaggacgtgtattggggtaaagatgtcactcagaagaacaaggaacacggctacactcacattgttgaggtcaccttcgaaagcgttgaaaccatcttggactacattatccaccccgctcatgttggtttcaaagctgtctatagaaagttctgggaaaaattgttgatttttgactacactcctcgtaagtaa

SEQ ID NO: 170 - DNA, 306 bp, Artificial Sequence
  Synthetic
atggcagtcaagcatctaatcgttttaaaatttaaggatgaaattacggaggaccaaaaagaaaagtttttcaaggcctacgaatcccttgttaacataatcccagccatgaaggacgtgtattggggtaaagatgtcactcagaagaacaaggaacacggctacactcacattgttattgtcaccttcgaaagcgttgaaaccatcttggactacattatccaccccgctcatgttggtttcaaagctgtctatagaaagtactgggaaaaattgttgatttttgactacactcctcgtaagtaa

SEQ ID NO: 171 - DNA, 306 bp, Artificial Sequence
  Synthetic
atggcagtcaagcatctaatcgttttaaaatttaaggatgaaattacggaggaccaaaaagaaaagtttttcaaggcctacgtatcacttgttaacataatcccagccatgaaggacgtgtattggggtaaagatgtcactcagaagaacaaggaacacggctacactcacattgttattgtcaccttcgaaagcgttgaaaccatcctggactacattatccaccccgctcatgttggtttcaaggctgtctatagatcatactgggaaaaattgttgatttttgactacactcctcgtaagtaa

SEQ ID NO: 172 - DNA, 306 bp, Artificial Sequence
  Synthetic
atggcagtcaagcatctaatcgttttaaaatttaaggatgaaattacggaggaccaaaaagaagaatttttcaaggcctacgtaagtcttgttaacataatcccagccatgaaggacgtgtattggggtaaagatgtcactcagaagaacaaggaacacggctacactcacattgttattgtcaccttcgaaagcgttgaaaccatcttggactacattatccaccccgctcatgttggtttcaaggctgtctatagatcatactgggaaaaattgttgatttttgactacactcctcgtaagtaa

SEQ ID NO: 173 - DNA, 306 bp, Artificial Sequence
  Synthetic
atggcagtcaagcatctaatcgttttaaaatttaaggatgaaattacggaggaccaaaaagaaaagtttttcaagacatacgtaagtcttgttaacataatcccagccatgaaggacgtgtattggggtaaagatgtcactcagaagaacaaggaacacggctacacttacattgttattgtcaccttcgaaagcgttgaaaccatcttggactacattatccaccccgctcatgttggtttcaaagccgtctatagaaagttctgggaaaaattgttgatttttgactacactcctcgtaagtaa

SEQ ID NO: 174 - DNA, 306 bp, Artificial Sequence
  Synthetic
atggcagtcaagcatctaatcgttttaaaatttaaggatgaaattacggaggaccaaaaagaagaatttttcaagacatacgaatctcttgttaacataatcccagccatgaaggacgtgtattggggtaaagatgtcactcagaagaacaaggaacacggctacactcacattgttattgtcaccttcgaaagcgttgaaaccatcctggactacattatccaccccgctcatgttggtttcaaggctgtctatagaaagttctgggaaaaattgttgatttttgactacactcctcgtaagtaa

SEQ ID NO: 175 - DNA, 306 bp, Artificial Sequence
  Synthetic
atggcagtcaagcatctaatcgttttaaaatttaaggatgaaattacggaggaccaaaaagaaaagtttttcaatgcctacgtaagccttgttaacataatcccagccatgaaggacgtgtattggggtaaagatgtcactcagaagaacaaggaacacggctacactcacattgttgaggtcaccttcgaaagcgttgaaaccatcttggactacattatccaccccgctcatgttggtttcaaggctgtctatagaaagttctgggaaaaattgttgatttttgactacactcctcgtaagtaa

SEQ ID NO: 176 - DNA, 306 bp, Artificial Sequence
  Synthetic
atggcagtcaagcatctaatcgttttaaaatttaaggatgaaattacggaggaccaaaaagaagaatttttcaacgcctacgtaagccttgttaacataatcccagccatgaaggacgtgtattggggtaaagatgtcactcagaagaacaaggaacacggctacactcacattgttattgtcaccttcgaaagcgttgaaaccatcttggactacattatccaccccgctcatgttggtttcaaggctgtctatagatcatactgggaaaaattgttgatttttgactacactcctcgtaagtaa

SEQ ID NO: 177 - DNA, 306 bp, Artificial Sequence
  Synthetic
atggcagtcaagcatctaatcgttttaaaatttaaggatgaaattacggaggaccaaaaagaaaagtttttcaacgcttacgtatctcttgttaacataatcccagccatgaaggacgtgtattggggtaaagatgtcactcagaagaacaaggaacacggctacactcacattgttattgtcaccttcgaaagcgttgaaaccatcttggactacattatccaccccgctcatgttggtttcaaggctgtctatagaaaattctgggaaaaattgttgatttttgactacactcctcgtaagtaa

SEQ ID NO: 178 - DNA, 306 bp, Artificial Sequence
  Synthetic
atggcagtcaagcatctaatcgttttaaaatttaaggatgaaattacggaggaccaaaaagaagaatttttcaaggcctacgtatcgcttgttaacataatcccagccatgaaggacgtgtattggggtaaagatgtcactcagaagaacaaggaacacggctacactcacattgttattgtcaccttcgaaagcgttgaaaccatcttggactacattatccaccccgctcatgttggtttcaaggctgtctatagatcattctgggaaaaattgttgatttttgactacactcctcgtaagtaa

SEQ ID NO: 179 - DNA, 306 bp, Artificial Sequence
  Synthetic
atggcagtcaagcatctaatcgttttaaaatttaaggatgaaattacggaggaccaaaaagaaaagtttttcaaggcctacgtatcgcttgttaacataatcccagccatgaaggacgtgtattggggtaaagatgtcactcagaagaacaaggaacacggctacactcacattgttgaggtcaccttcgaaagcgttgaaaccatcttggactacattatccaccccgctcatgttggtttcaaagctgtctatagaaagtactgggaaaaattgttgatttttgactacactcctcgtaagtaa

SEQ ID NO: 180 - DNA, 306 bp, Artificial Sequence
  Synthetic
atggcagtcaagcatctaatcgttttaaaatttaaggatgaaattacggaggaccaaaaagaagaatttttcaaggcctacgaatcacttgttaacataatcccagccatgaaggacgtgtattggggtaaagatgtcactcagaagaacaaggaacacggctacactcacattgttgaggtcaccttcgaaagcgttgaaaccatcttggactacattatccaccccgctcatgttggtttcaaggctgtctatagaaaattctgggaaaaattgttgatttttgactacactcctcgtaagtaa

SEQ ID NO: 181 - DNA, 306 bp, Artificial Sequence
  Synthetic
atggcagtcaagcatctaatcgttttaaaatttaaggatgaaattacggaggaccaaaaagaaaagtttttcaaggcttacgaaagccttgttaacataatcccagccatgaaggacgtgtattggggtaaagatgtcactcagaagaacaaggaacacggctacactcacattgttattgtcaccttcgaaagcgttgaaaccatcttggactacattatccaccccgctcatgttggtttcaaagctgtctatagatcatactgggaaaaattgttgatttttgactacactcctcgtaagtaa

SEQ ID NO: 182 - DNA, 306 bp, Artificial Sequence
  Synthetic
atggcagtcaagcatctaatcgttttaaaatttaaggatgaaattacggaggaccaaaaagaagaatttttcaaggcttacgtatcgcttgttaacataatcccagccatgaaggacgtgtattggggtaaagatgtcactcagaagaacaaggaacacggctacactcacattgttgaggtcaccttcgaaagcgttgaaaccatcctggactacattatccaccccgctcatgttggtttcaaggctgtctatagatcattctgggaaaaattgttgatttttgactacactcctcgtaagtaa

SEQ ID NO: 183 - DNA, 306 bp, Artificial Sequence
  Synthetic
atggcagtcaagcatctaatcgttttaaaatttaaggatgaaattacggaggaccaaaaagaaaagtttttcaatgcttacgtatctcttgttaacataatcccagccatgaaggacgtgtattggggtaaagatgtcactcagaagaacaaggaacacggctacactcacattgttattgtcaccttcgaaagcgttgaaaccatcttggactacattatccaccccgctcatgttggtttcaaagctgtctatagaaagtactgggaaaaattgttgatttttgactacactcctcgtaagtaa

SEQ ID NO: 184 - DNA, 306 bp, Artificial Sequence
  Synthetic
atggcagtcaagcatctaatcgttttaaaatttaaggatgaaattacggaggaccaaaaagaaaagtttttcaaggcttacgtagaacttgttaacataatcccagccatgaaggacgtgtattggggtaaagatgtcactcagaagaacaaggaacacggctacactcacattgttattgtcaccttcgaaagcgttgaaaccatcttggactacattatccaccccgctcatgttggtttcaaagctgtctatagaaagttctgggaaaaattgttgatttttgactacactcctcgtaagtaa

SEQ ID NO: 185 - DNA, 306 bp, Artificial Sequence
  Synthetic
atggcagtcaagcatctaatcgttttaaaatttaaggatgaaattacggaggaccaaaaagaaaagtttttcaaggcctacgtaagtcttgttaacataatcccagccatgaaggacgtgtattggggtaaagatgtcactcagaagaacaaggaacacggctacactcacattgttgaggtcaccttcgaaagcgttgaaaccatcttggactacattatccaccccgctcatgttggtttcaaggctgtctatagatcattctgggaaaaattgttgatttttgactacactcctcgtaagtaa

SEQ ID NO: 186 - DNA, 306 bp, Artificial Sequence
  Synthetic
atggcagtcaagcatctaatcgttttaaaatttaaggatgaaattacggaggaccaaaaagaaaagtttttcaaggcttacgtatcgcttgttaacataatcccagccatgaaggacgtgtattggggtaaagatgtcactcagaagaacaaggaacacggctacactcacattgttattgtcaccttcgaaagcgttgaaaccatcttggactacattatccaccccgctcatgttggtttcaaggctgtctatagatcattctgggaaaaattgttgatttttgactacactcctcgtaagtaa

SEQ ID NO: 187 - DNA, 306 bp, Artificial Sequence
  Synthetic
atggcagtcaagcatctaatcgttttaaaatttaaggatgaaattacggaggaccaaaaagaagaatttttcaaggcttacgtatcacttgttaacataatcccagccatgaaggacgtgtattggggtaaagatgtcactcagaagaacaaggaacacggctacactcacattgttgaggtcaccttcgaaagcgttgaaaccatcctggactacattatccaccccgctcatgttggtttcaaagctgtctatagaaagtactgggaaaaattgttgatttttgactacactcctcgtaagtaa

SEQ ID NO: 188 - DNA, 306 bp, Artificial Sequence
  Synthetic
atggcagtcaagcatctaatcgttttaaaatttaaggatgaaattacggaggaccaaaaagaaaagtttttcaagacatacgtatcccttgttaacataatcccagccatgaaggacgtgtattggggtaaagatgtcactcagaagaacaaggaacacggctacactcacattgttattgtcaccttcgaaagcgttgaaaccatcctggactacattatccaccccgctcatgttggtttcaaggctgtctatagaaaattctgggaaaaattgttgatttttgactacactcctcgtaagtaa

SEQ ID NO: 189 - DNA, 306 bp, Artificial Sequence
  Synthetic
atggcagtcaagcatctaatcgttttaaaatttaaggatgaaattacggaggaccaaaaagaagaatttttcaagacatacgtatcccttgttaacataatcccagccatgaaggacgtgtattggggtaaagatgtcactcagaagaacaaggaacacggctacactcacattgttgaggtcaccttcgaaagcgttgaaaccatcctggactacattatccaccccgctcatgttggtttcaaagctgtctatagaaagttctgggaaaaattgttgatttttgactacactcctcgtaagtaa

SEQ ID NO: 190 - DNA, 306 bp, Artificial Sequence
  Synthetic
atggcagtcaagcatctaatcgttttaaaatttaaggatgaaattacggaggaccaaaaagaagaatttttcaaggcctacgagtcccttgttaacataatcccagccatgaaggacgtgtattggggtaaagatgtcactcagaagaacaaggaacacggctacactcacattgttattgtcaccttcgaaagcgttgaaaccatcctggactacattatccaccccgctcatgttggtttcaaggctgtctatagaaaatactgggaaaaattgttgatttttgactacactcctcgtaagtaa

SEQ ID NO: 191 - DNA, 306 bp, Artificial Sequence
  Synthetic
atggcagtcaagcatctaatcgttttaaaatttaaggatgaaattacggaggaccaaaaagaaaagtttttcaaggcctacgtagaacttgttaacataatcccagccatgaaggacgtgtattggggtaaagatgtcactcagaagaacaaggaacacggctacactcacattgttgaggtcaccttcgaaagcgttgaaaccatcctggactacattatccaccccgctcatgttggtttcaaagctgtctatagaaagttctgggaaaaattgttgatttttgactacactcctcgtaagtaa

SEQ ID NO: 192 - DNA, 306 bp, Artificial Sequence
  Synthetic
atggcagtcaagcatctaatcgttttaaaatttaaggatgaaattacggaggaccaaaaagaaaagtttttcaaggcttacgtatcccttgttaacataatcccagccatgaaggacgtgtattggggtaaagatgtcactcagaagaacaaggaacacggctacactcacattgttattgtcaccttcgaaagcgttgaaaccatcttggactacattatccaccccgctcatgttggtttcaaggctgtctatagaaaattctgggaaaaattgttgatttttgactacactcctcgtaagtaa

SEQ ID NO: 193 - DNA, 306 bp, Artificial Sequence
  Synthetic
atggcagtcaagcatctaatcgttttaaaatttaaggatgaaattacggaggaccaaaaagaagaatttttcaagacatacgtaagtcttgttaacataatcccagccatgaaggacgtgtattggggtaaagatgtcactcagaagaacaaggaacacggctacactcacattgttgaggtcaccttcgaaagcgttgaaaccatcctggactacattatccaccccgctcatgttggtttcaaagctgtctatagaaagtactgggaaaaattgttgatttttgactacactcctcgtaagtaa

SEQ ID NO: 194 - DNA, 306 bp, Artificial Sequence
  Synthetic
atggcagtcaagcatctaatcgttttaaaatttaaggatgaaattacggaggaccaaaaagaaaagtttttcaatgcttacgtatctcttgttaacataatcccagccatgaaggacgtgtattggggtaaagatgtcactcagaagaacaaggaacacggctacactcacattgttattgtcaccttcgaaagcgttgaaaccatcttggactacattatccaccccgctcatgttggtttcaaggctgtctatagatcatactgggaaaaattgttgatttttgactacactcctcgtaagtaa

SEQ ID NO: 195 - protein, 390 aa, Unknown
  Cymbidium hybrid cultivar
MPSLESVKKSNRADGFASILAIGRANPENFIEQSTYPDFFFRVTNSEHLVNLKKKFQRICDKTAIRKRHFVWNEELLNANPCLGTFMDNSLNVRQEFAIREIPKLGAEAATKAIQEWGQPKSRITHLIFCTTSGMDLPGADYQLTQILGLNPNIERVMLYQQGCFAGGTTLRLAKCLAESRKGARVLVVCAETTAVLFRAPSEEHQDDLVTQALFADGASALIVGADPDETAHERASFVIVSTSQVLLPDSAGAIGGHVSEGGLIATLHRDVPQIVSKNVGKCLEEAFTPLGISDWNSIFWVPHPGGRAILDQVEERVGLKPEKLIVSRHVLAEYGNMSSVCVHFALDEMRKRSKKEGKATTGEGLDWGVLFGFGPGLTVETVVLHSVPI

SEQ ID NO: 196 - protein, 101 aa, Artificial Sequence
  Synthetic
MAVKHLIVLKFKDEITNDQKEEFFKTYVNLLNNIPAMKDVYWGKDVTQKNKEEGYTHIVEVTFESVETIQSYIIHPAHVGFGAVYRSFWEKLLIFDYTPRK

SEQ ID NO: 197 - protein, 101 aa, Artificial Sequence
  Synthetic
MAVKHLIVLKFKDEITNDQKEEFFKTYVNLVNIIPAMKQVYWGKDVTQKNKEEGYTHIVEVTFESVETIQSYIIHPAHVGFGAFYRSFWEKLLIFDYTPRK

SEQ ID NO: 198 - protein, 101 aa, Artificial Sequence
  Synthetic
MAVKHLIVLKFKDEITNAQKEEFFKTYVNLLNNIPAMKQVYWGKDVTQKNKEEGYTHIVEVTFESVETIQSYIIHPAHVGFGDFYRSFWEKLLIFDYTPRK

SEQ ID NO: 199 - protein, 101 aa, Artificial Sequence
  Synthetic
MAVKHLIVLKFKDEITEDQKEEFFKTYVTLLNNIPAMKQVYWGKDVTQKNKEEGYTHIVEVTFESVETIQSYIIHPAHVGFGDVYRSFWEKLLIFDYTPRK

SEQ ID NO: 200 - protein, 101 aa, Artificial Sequence
  Synthetic
MAVKHLIVLKFKDEITNDQKEEFFKTYVTLLNIIPAMKQVYWGKDVTQKNKEEGYTHIVEVTFESVETIQDYIIHPAHVGFGDFYRSFWEKLLIFDYTPRK

SEQ ID NO: 201 - protein, 101 aa, Artificial Sequence
  Synthetic
MAVKHLIVLKFKDEITNAQKEEFFKTYVTLLNNIPAMKQVYWGKDVTQKNKEEGYTHIVEVTFESVETIQDYIIHPAHVGFGDFYRSFWEKLLIFDYTPRK

SEQ ID NO: 202 - protein, 101 aa, Artificial Sequence
  Synthetic
MAVKHLIVLKFKDEITNAQKEEFFKTYVNLLNNIPAMKQVYWGKDVTQKNKEEGYTHIVEVTFESVETIQDYIIHPAHVGFGAFYRSFWEKLLIFDYTPRK

SEQ ID NO: 203 - protein, 101 aa, Artificial Sequence
  Synthetic
MAVKHLIVLKFKDEITEDQKEEFFKTYVTLLNNIPAMKDVYWGKDVTQKNKEEGYTHIVEVTFESVETIQSYIIHPAHVGFGDFYRSFWEKLLIFDYTPRK

SEQ ID NO: 204 - protein, 101 aa, Artificial Sequence
  Synthetic
MAVKHLIVLKFKDEITNDQKEEFFKTYVTLLNNIPAMKDVYWGKDVTQKNKEEGYTHIVEVTFESVETIQDYIIHPAHVGFGAVYRSFWEKLLIFDYTPRK

SEQ ID NO: 205 - protein, 101 aa, Artificial Sequence
  Synthetic
MAVKHLIVLKFKDEITEDQKEEFFKTYVTLVNNIPAMKDVYWGKDVTQKNKEEGYTHIVEVTFESVETIQSYIIHPAHVGFGAFYRSFWEKLLIFDYTPRK

SEQ ID NO: 206 - protein, 101 aa, Artificial Sequence
  Synthetic
MAVKHLIVLKFKDEITNDQKEEFFKTYVNLLNNIPAMKDVYWGKDVTQKNKEEGYTHIVEVTFESVETIQDYIIHPAHVGFGAFYRSFWEKLLIFDYTPRK

SEQ ID NO: 207 - protein, 101 aa, Artificial Sequence
  Synthetic
MAVKHLIVLKFKDEITEDQKEEFFKTYVTLLNNIPAMKDVYWGKDVTQKNKEEGYTHIVEVTFESVETIQDYIIHPAHVGFGAFYRSFWEKLLIFDYTPRK

SEQ ID NO: 208 - protein, 101 aa, Artificial Sequence
  Synthetic
MAVKHLIVLKFKDEITNAQKEEFFKTYVNLVNNIPAMKQVYWGKDVTQKNKEEGYTHIVEVTFESVETIQSYIIHPAHVGFGAFYRSFWEKLLIFDYTPRK

SEQ ID NO: 209 - protein, 101 aa, Artificial Sequence
  Synthetic
MAVKHLIVLKFKDEITNDQKEEFFKTYVTLVNNIPAMKQVYWGKDVTQKNKEEGYTHIVEVTFESVETIQDYIIHPAHVGFGDFYRSFWEKLLIFDYTPRK

SEQ ID NO: 210 - protein, 101 aa, Artificial Sequence
  Synthetic
MAVKHLIVLKFKDEITEDQKEEFFKTYVTLLNIIPAMKQVYWGKDVTQKNKEEGYTHIVEVTFESVETIQSYIIHPAHVGFGDFYRSFWEKLLIFDYTPRK

SEQ ID NO: 211 - protein, 101 aa, Artificial Sequence
  Synthetic
MAVKHLIVLKFKDEITEDQKEEFFKTYVTLLNNIPAMKQVYWGKDVTQKNKEEGYTHIVEVTFESVETIQDYIIHPAHVGFGDFYRSFWEKLLIFDYTPRK

SEQ ID NO: 212 - protein, 101 aa, Artificial Sequence
  Synthetic
MAVKHLIVLKFKDEITNAQKEEFFKTYVTLLNNIPAMKDVYWGKDVTQKNKEEGYTHIVEVTFESVETIQSYIIHPAHVGFGDFYRSFWEKLLIFDYTPRK

SEQ ID NO: 213 - protein, 101 aa, Artificial Sequence
  Synthetic
MAVKHLIVLKFKDEITNDQKEEFFKTYVTLLNNIPAMKDVYWGKDVTQKNKEEGYTHIVEVTFESVETIQDYIIHPAHVGFGDFYRSFWEKLLIFDYTPRK

SEQ ID NO: 214 - protein, 101 aa, Artificial Sequence
  Synthetic
MAVKHLIVLKFKDEITNAQKEEFFKTYVTLLNIIPAMKQVYWGKDVTQKNKEEGYTHIVEVTFESVETIQSYIIHPAHVGFGDFYRSFWEKLLIFDYTPRK

SEQ ID NO: 215 - protein, 101 aa, Artificial Sequence
  Synthetic
MAVKHLIVLKFKDEITEDQKEEFFKTYVTLVNNIPAMKQVYWGKDVTQKNKEEGYTHIVEVTFESVETIQDYIIHPAHVGFGAFYRSFWEKLLIFDYTPRK

SEQ ID NO: 216 - protein, 101 aa, Artificial Sequence
  Synthetic
MAVKHLIVLKFKDEITNAQKEEFFKTYVTLLNNIPAMKDVYWGKDVTQKNKEEGYTHIVEVTFESVETIQSYIIHPAHVGFGAVYRSFWEKLLIFDYTPRK

SEQ ID NO: 217 - protein, 101 aa, Artificial Sequence
  Synthetic
MAVKHLIVLKFKDEITEAQKEEFFKTYVTLLNNIPAMKQVYWGKDVTQKNKEEGYTHIVEVTFESVETIQSYIIHPAHVGFGDFYRSFWEKLLIFDYTPRK

SEQ ID NO: 218 - protein, 101 aa, Artificial Sequence
  Synthetic
MAVKHLIVLKFKDEITEDQKEEFFKTYVTLLNNIPAMKQVYWGKDVTQKNKEEGYTHIVEVTFESVETIQDYIIHPAHVGFGAVYRSFWEKLLIFDYTPRK

SEQ ID NO: 219 - protein, 101 aa, Artificial Sequence
  Synthetic
MAVKHLIVLKFKDEITEDQKEEFFKTYVTLLNIIPAMKQVYWGKDVTQKNKEEGYTHIVEVTFESVETIQDYIIHPAHVGFGAFYRSFWEKLLIFDYTPRK

SEQ ID NO: 220 - protein, 101 aa, Artificial Sequence
  Synthetic
MAVKHLIVLKFKDEITEDQKEEFFKTYVNLLNIIPAMKQVYWGKDVTQKNKEEGYTHIVEVTFESVETIQSYIIHPAHVGFGAFYRSFWEKLLIFDYTPRK

SEQ ID NO: 221 - protein, 101 aa, Artificial Sequence
  Synthetic
MAVKHLIVLKFKDEITNDQKEEFFKTYVNLVNNIPAMKQVYWGKDVTQKNKEEGYTHIVEVTFESVETIQDYIIHPAHVGFGAFYRSFWEKLLIFDYTPRK

SEQ ID NO: 222 - protein, 101 aa, Artificial Sequence
  Synthetic
MAVKHLIVLKFKDEITNAQKEEFFKTYVNLLNNIPAMKQVYWGKDVTQKNKEEGYTHIVEVTFESVETIQSYIIHPAHVGFGAVYRSFWEKLLIFDYTPRK

SEQ ID NO: 223 - protein, 101 aa, Artificial Sequence
  Synthetic
MAVKHLIVLKFKDEITNAQKEEFFKTYVNLLNNIPAMKDVYWGKDVTQKNKEEGYTHIVEVTFESVETIQSYIIHPAHVGFGAFYRSFWEKLLIFDYTPRK

SEQ ID NO: 224 - protein, 101 aa, Artificial Sequence
  Synthetic
MAVKHLIVLKFKDEITNAQKEEFFKTYVTLLNNIPAMKQVYWGKDVTQKNKEEGYTHIVEVTFESVETIQSYIIHPAHVGFGDVYRSFWEKLLIFDYTPRK

SEQ ID NO: 225 - protein, 101 aa, Artificial Sequence
  Synthetic
MAVKHLIVLKFKDEITNAQKEEFFKTYVTLVNNIPAMKQVYWGKDVTQKNKEEGYTHIVEVTFESVETIQSYIIHPAHVGFGAVYRSFWEKLLIFDYTPRK

SEQ ID NO: 226 - protein, 101 aa, Artificial Sequence
  Synthetic
MAVKHLIVLKFKDEITNAQKEEFFKTYVTLLNIIPAMKQVYWGKDVTQKNKEEGYTHIVEVTFESVETIQDYIIHPAHVGFGAFYRSFWEKLLIFDYTPRK

SEQ ID NO: 227 - protein, 101 aa, Artificial Sequence
  Synthetic
MAVKHLIVLKFKDEITNDQKEEFFKTYVNLLNNIPAMKDVYWGKDVTQKNKEEGYTHIVEVTFESVETIQSYIIHPAHVGFGDFYRSFWEKLLIFDYTPRK

SEQ ID NO: 228 - protein, 101 aa, Artificial Sequence
  Synthetic
MAVKHLIVLKFKDEITNAQKEEFFKTYVTLVNNIPAMKQVYWGKDVTQKNKEEGYTHIVEVTFESVETIQSYIIHPAHVGFGDFYRSFWEKLLIFDYTPRK

SEQ ID NO: 229 - protein, 101 aa, Artificial Sequence
  Synthetic
MAVKHLIVLKFKDEITNDQKEEFFKTYVTLVNNIPAMKQVYWGKDVTQKNKEEGYTHIVEVTFESVETIQDYIIHPAHVGFGAVYRSFWEKLLIFDYTPRK

SEQ ID NO: 230 - protein, 101 aa, Artificial Sequence
  Synthetic
MAVKHLIVLKFKDEITEDQKEEFFKTYVTLLNNIPAMKDVYWGKDVTQKNKEEGYTHIVEVTFESVETIQSYIIHPAHVGFGAVYRSFWEKLLIFDYTPRK

SEQ ID NO: 231 - protein, 101 aa, Artificial Sequence
  Synthetic
MAVKHLIVLKFKDEITNDQKEEFFKTYVNLLNIIPAMKQVYWGKDVTQKNKEEGYTHIVEVTFESVETIQSYIIHPAHVGFGDFYRSFWEKLLIFDYTPRK

SEQ ID NO: 232 - protein, 101 aa, Artificial Sequence
  Synthetic
MAVKHLIVLKFKDEITNAQKEEFFKTYVTLLNNIPAMKQVYWGKDVTQKNKEEGYTHIVEVTFESVETIQDYIIHPAHVGFGAVYRSFWEKLLIFDYTPRK

SEQ ID NO: 233 - protein, 101 aa, Artificial Sequence
  Synthetic
MAVKHLIVLKFKDEITEDQKEEFFKTYVNLLNNIPAMKQVYWGKDVTQKNKEEGYTHIVEVTFESVETIQSYIIHPAHVGFGDFYRSFWEKLLIFDYTPRK

SEQ ID NO: 234 - protein, 101 aa, Artificial Sequence
  Synthetic
MAVKHLIVLKFKDEITEDQKEEFFKTYVTLVNNIPAMKQVYWGKDVTQKNKEEGYTHIVEVTFESVETIQSYIIHPAHVGFGAVYRSFWEKLLIFDYTPRK

SEQ ID NO: 235 - protein, 101 aa, Artificial Sequence
  Synthetic
MAVKHLIVLKFKDEITEAQKEEFFKTYVTLLNNIPAMKQVYWGKDVTQKNKEEGYTHIVEVTFESVETIQSYIIHPAHVGFGAVYRSFWEKLLIFDYTPRK

SEQ ID NO: 236 - protein, 101 aa, Artificial Sequence
  Synthetic
MAVKHLIVLKFKDEITNDQKEEFFKTYVTLVNIIPAMKQVYWGKDVTQKNKEEGYTHIVEVTFESVETIQSYIIHPAHVGFGDFYRSFWEKLLIFDYTPRK

SEQ ID NO: 237 - protein, 101 aa, Artificial Sequence
  Synthetic
MAVKHLIVLKFKDEITNDQKEEFFKTYVTLVNIIPAMKDVYWGKDVTQKNKEEGYTHIVEVTFESVETIQSYIIHPAHVGFGAFYRSFWEKLLIFDYTPRK

SEQ ID NO: 238 - protein, 101 aa, Artificial Sequence
  Synthetic
MAVKHLIVLKFKDEITNAQKEEFFKTYVTLLNNIPAMKDVYWGKDVTQKNKEEGYTHIVEVTFESVETIQDYIIHPAHVGFGAFYRSFWEKLLIFDYTPRK

SEQ ID NO: 239 - protein, 101 aa, Artificial Sequence
  Synthetic
MAVKHLIVLKFKDEITNDQKEEFFKTYVTLVNNIPAMKDVYWGKDVTQKNKEEGYTHIVEVTFESVETIQSYIIHPAHVGFGAVYRSFWEKLLIFDYTPRK

SEQ ID NO: 240 - protein, 101 aa, Artificial Sequence
  Synthetic
MAVKHLIVLKFKDEITEDQKEEFFKTYVTLLNIIPAMKDVYWGKDVTQKNKEEGYTHIVEVTFESVETIQSYIIHPAHVGFGAFYRSFWEKLLIFDYTPRK

SEQ ID NO: 241 - protein, 101 aa, Artificial Sequence
  Synthetic
MAVKHLIVLKFKDEITNDQKEEFFKTYVTLLNNIPAMKQVYWGKDVTQKNKEEGYTHIVEVTFESVETIQDYIIHPAHVGFGDVYRSFWEKLLIFDYTPRK

SEQ ID NO: 242 - protein, 101 aa, Artificial Sequence
  Synthetic
MAVKHLIVLKFKDEITNAQKEEFFKTYVNLLNIIPAMKQVYWGKDVTQKNKEEGYTHIVEVTFESVETIQSYIIHPAHVGFGAFYRSFWEKLLIFDYTPRK

SEQ ID NO: 243 - protein, 101 aa, Artificial Sequence
  Synthetic
MAVKHLIVLKFKDEITNDQKEEFFKTYVNLVNNIPAMKDVYWGKDVTQKNKEEGYTHIVEVTFESVETIQSYIIHPAHVGFGAFYRSFWEKLLIFDYTPRK

SEQ ID NO: 244 - protein, 101 aa, Artificial Sequence
  Synthetic
MAVKHLIVLKFKDEITEDQKEEFFKTYVNLLNNIPAMKDVYWGKDVTQKNKEEGYTHIVEVTFESVETIQSYIIHPAHVGFGAFYRSFWEKLLIFDYTPRK

SEQ ID NO: 245 - protein, 101 aa, Artificial Sequence
  Synthetic
MAVKHLIVLKFKDEITNAQKEEFFKTYVTLVNNIPAMKQVYWGKDVTQKNKEEGYTHIVEVTFESVETIQDYIIHPAHVGFGAFYRSFWEKLLIFDYTPRK

SEQ ID NO: 246 - protein, 101 aa, Artificial Sequence
  Synthetic
MAVKHLIVLKFKDEITNDQKEEFFKTYVTLVNNIPAMKDVYWGKDVTQKNKEEGYTHIVEVTFESVETIQSYIIHPAHVGFGDFYRSFWEKLLIFDYTPRK

SEQ ID NO: 247 - protein, 101 aa, Artificial Sequence
  Synthetic
MAVKHLIVLKFKDEITNAQKEEFFKTYVTLLNIIPAMKDVYWGKDVTQKNKEEGYTHIVEVTFESVETIQSYIIHPAHVGFGAFYRSFWEKLLIFDYTPRK

SEQ ID NO: 248 - protein, 101 aa, Artificial Sequence
  Synthetic
MAVKHLIVLKFKDEITNAQKEEFFKTYVTLVNNIPAMKDVYWGKDVTQKNKEEGYTHIVEVTFESVETIQSYIIHPAHVGFGAFYRSFWEKLLIFDYTPRK

SEQ ID NO: 249 - protein, 101 aa, Artificial Sequence
  Synthetic
MAVKHLIVLKFKDEITEAQKEEFFKTYVTLLNNIPAMKQVYWGKDVTQKNKEEGYTHIVEVTFESVETIQDYIIHPAHVGFGAFYRSFWEKLLIFDYTPRK

SEQ ID NO: 250 - protein, 101 aa, Artificial Sequence
  Synthetic
MAVKHLIVLKFKDEITEDQKEEFFKTYVTLVNIIPAMKQVYWGKDVTQKNKEEGYTHIVEVTFESVETIQSYIIHPAHVGFGAFYRSFWEKLLIFDYTPRK

SEQ ID NO: 251 - protein, 101 aa, Artificial Sequence
  Synthetic
MAVKHLIVLKFKDEITNDQKEEFFKTYVNLVNNIPAMKQVYWGKDVTQKNKEEGYTHIVEVTFESVETIQSYIIHPAHVGFGDFYRSFWEKLLIFDYTPRK

SEQ ID NO: 252 - protein, 101 aa, Artificial Sequence
  Synthetic
MAVKHLIVLKFKDEITNDQKEEFFKTYVTLLNNIPAMKDVYWGKDVTQKNKEEGYTHIVEVTFESVETIQSYIIHPAHVGFGDVYRSFWEKLLIFDYTPRK

SEQ ID NO: 253 - protein, 101 aa, Artificial Sequence
  Synthetic
MAVKHLIVLKFKDEITNDQKEEFFKTYVTLVNNIPAMKDVYWGKDVTQKNKEEGYTHIVEVTFESVETIQDYIIHPAHVGFGAFYRSFWEKLLIFDYTPRK

SEQ ID NO: 254 - protein, 101 aa, Artificial Sequence
  Synthetic
MAVKHLIVLKFKDEITNDQKEEFFKTYVNLLNIIPAMKQVYWGKDVTQKNKEEGYTHIVEVTFESVETIQDYIIHPAHVGFGAFYRSFWEKLLIFDYTPRK

SEQ ID NO: 255 - protein, 101 aa, Artificial Sequence
  Synthetic
MAVKHLIVLKFKDEITNDQKEEFFKTYVNLLNIIPAMKDVYWGKDVTQKNKEEGYTHIVEVTFESVETIQSYIIHPAHVGFGAFYRSFWEKLLIFDYTPRK

SEQ ID NO: 256 - protein, 101 aa, Artificial Sequence
  Synthetic
MAVKHLIVLKFKDEITNDQKEEFFKTYVTLLNIIPAMKDVYWGKDVTQKNKEEGYTHIVEVTFESVETIQSYIIHPAHVGFGDFYRSFWEKLLIFDYTPRK

SEQ ID NO: 257 - protein, 101 aa, Artificial Sequence
  Synthetic
MAVKHLIVLKFKDEITNDQKEEFFKTYVNLLNNIPAMKQVYWGKDVTQKNKEEGYTHIVEVTFESVETIQDYIIHPAHVGFGDFYRSFWEKLLIFDYTPRK

SEQ ID NO: 258 - protein, 101 aa, Artificial Sequence
  Synthetic
MAVKHLIVLKFKDEITEDQKEEFFKTYVNLLNNIPAMKQVYWGKDVTQKNKEEGYTHIVEVTFESVETIQSYIIHPAHVGFGAVYRSFWEKLLIFDYTPRK

SEQ ID NO: 259 - protein, 101 aa, Artificial Sequence
  Synthetic
MAVKHLIVLKFKDEITEDQKEEFFKTYVNLVNNIPAMKQVYWGKDVTQKNKEEGYTHIVEVTFESVETIQSYIIHPAHVGFGAFYRSFWEKLLIFDYTPRK

SEQ ID NO: 260 - protein, 101 aa, Artificial Sequence
  Synthetic
MAVKHLIVLKFKDEITNDQKEEFFKTYVNLVNNIPAMKQVYWGKDVTQKNKEEGYTHIVEVTFESVETIQSYIIHPAHVGFGAVYRSFWEKLLIFDYTPRK

SEQ ID NO: 261 - protein, 101 aa, Artificial Sequence
  Synthetic
MAVKHLIVLKFKDEITNDQKEEFFKTYVNLLNNIPAMKQVYWGKDVTQKNKEEGYTHIVEVTFESVETIQSYIIHPAHVGFGDVYRSFWEKLLIFDYTPRK

SEQ ID NO: 262 - protein, 101 aa, Artificial Sequence
  Synthetic
MAVKHLIVLKFKDEITNDQKEEFFKTYVNLLNNIPAMKQVYWGKDVTQKNKEEGYTHIVEVTFESVETIQDYIIHPAHVGFGAVYRSFWEKLLIFDYTPRK

SEQ ID NO: 263 - protein, 101 aa, Artificial Sequence
  Synthetic
MAVKHLIVLKFKDEITNDQKEEFFKTYVTLVNNIPAMKQVYWGKDVTQKNKEEGYTHIVEVTFESVETIQSYIIHPAHVGFGDVYRSFWEKLLIFDYTPRK

SEQ ID NO: 264 - protein, 101 aa, Artificial Sequence
  Synthetic
MAVKHLIVLKFKDEITEAQKEEFFKTYVTLVNNIPAMKQVYWGKDVTQKNKEEGYTHIVEVTFESVETIQSYIIHPAHVGFGAFYRSFWEKLLIFDYTPRK

SEQ ID NO: 265 - protein, 101 aa, Artificial Sequence
  Synthetic
MGYKHLIVLKFKDEITEAQKEEFFKTYVNLVNIIPAMKDVYWGKDFTQKNKEEGYTHIVLVTFESVKHIQDYIIHPAHVDFGSVYSSFMEKLLIFDYKPSE

SEQ ID NO: 266 - protein, 101 aa, Artificial Sequence
  Synthetic
MAVKHLIVLKFKDEITEAQKEEFFKTYVNLVNHIPAMKDVYWGKDVTQKNKHEGYTHIVEVTFESVETIADYIIHPAHVAFGKVARSFWEKLLIFDYTPRK

SEQ ID NO: 267 - protein, 101 aa, Artificial Sequence
  Synthetic
MAVKHLIVLKFKDEITEAQKEEFFKRYVNLVNHIPAMKDVYWGKDVTQKNKHEGFTHIVEVTFESVETIAQYIIHPAHVAFGNVARSFWEKLLIFDYTPRK

SEQ ID NO: 268 - protein, 101 aa, Artificial Sequence
  Synthetic
MAVKHLIVLKFKDEITEAQKEEFFKTYVNLVNIIPAMKDVYWGKDVTQKNKHEGFTHIVEVTFESVETIADYIIHPAHVAFGKKARSFWEKLLIFDYTPRK

SEQ ID NO: 269 - protein, 101 aa, Artificial Sequence
  Synthetic
MAVKHLIVLKFKDEITEDQKEEFMKRYVNLVNHIPAMKDVYWGKDVTQKNKHEGFTHIVEVTFESVETIADYIIHPAHVAFGNKARSFWEKLLIFDYTPRK

SEQ ID NO: 270 - protein, 101 aa, Artificial Sequence
  Synthetic
MAVKHLIVLKFKDEITEAQKEEFFKRYVNLVNRIPAMKDVYWGKDVTQKNKHEGFTHIVEVTFESVETIADYIIHPAHVAFGDVARSFWEKLLIFDYTPRK

SEQ ID NO: 271 - protein, 101 aa, Artificial Sequence
  Synthetic
MAVKHLIVLKFKDEITEDQKEEFFKRYVNLVNRIPAMKDVYWGKDVTQKNKHEGFTHIVEVTFESVETIADYIIHPAHVAFGKVYRSFWEKLLIFDYTPRK

SEQ ID NO: 272 - protein, 101 aa, Artificial Sequence
  Synthetic
MAVKHLIVLKFKDEITEAQKEEFFKRYVNLVNIIPAMKDVYWGKDVTQKNKHEGFTHIVEVTFESVETIADYIIHPAHVAFGKFYRSFWEKLLIFDYTPRK

SEQ ID NO: 273 - protein, 101 aa, Artificial Sequence
  Synthetic
MAVKHLIVLKFKDEITEAQKEEFFKRYVNLVNRIPAMKDVYWGKDVTQKNKHEGFTHIVEVTFESVETIQDYIIHPAHVAFGDVARSFWEKLLIFDYTPRK

SEQ ID NO: 274 - protein, 101 aa, Artificial Sequence
  Synthetic
MAVKHLIVLKFKDEITEDQKEEFMKRYVSLVNRIPAMKDVYWGKDVTQKNKHEGFTHIVEVTFESVETIADYIIHPAHVAFGNFARSFWEKLLIFDYTPRK

SEQ ID NO: 275 - protein, 101 aa, Artificial Sequence
  Synthetic
MAVKHLIVLKFKDEITEAQKEEFFKRYVNLVNRIPAMKDVYWGKDVTQKNKHEGFTHIVEVTFESVETIADYIIHPAHVAFGNKARSFWEKLLIFDYTPRK

SEQ ID NO: 276 - protein, 101 aa, Artificial Sequence
  Synthetic
MAVKHLIVLKFKDEITEAQKEEFMKTYVNLVNIIPAMKDVYWGKDVTQKNKHEGYTHIVEVTFESVETIADYIIHPAHVAFGKVARSFWEKLLIFDYTPRK

SEQ ID NO: 277 - protein, 101 aa, Artificial Sequence
  Synthetic
MAVKHLIVLKFKDEITEAQKEEFFKRYVNLVNRIPAMKDVYWGKDVTQKNKHEGYTHIVEVTFESVETIADYIIHPAHVAFGKVYRSFWEKLLIFDYTPRK

SEQ ID NO: 278 - protein, 101 aa, Artificial Sequence
  Synthetic
MAVKHLIVLKFKDEITEAQKEEFFKTYVNLVNHIPAMKDVYWGKDVTQKNKHEGFTHIVEVTFESVETIADYIIHPAHVAFGKKYRSFWEKLLIFDYTPRK

SEQ ID NO: 279 - protein, 101 aa, Artificial Sequence
  Synthetic
MAVKHLIVLKFKDEITEDQKEEFFKRYVSLVNHIPAMKDVYWGKDVTQKNKHEGFTHIVEVTFESVETIADYIGHPAHVAFGNVARSFWEKLLIFDYTPRK

SEQ ID NO: 280 - protein, 101 aa, Artificial Sequence
  Synthetic
MAVKHLIVLKFKDEITEAQKEEFFKRYVNLVNHIPAMKDVYWGKDVTQKNKHEGFTHIVEVTFESVETIADYIGHPAHVAFGNVARSFWEKLLIFDYTPRK

SEQ ID NO: 281 - protein, 101 aa, Artificial Sequence
  Synthetic
MAVKHLIVLKFKDEITEDQKEEFFKRYVNLVNRIPAMKDVYWGKDVTQKNKHEGFTHIVEVTFESVETIADYIIHPAHVAFGNVARSFWEKLLIFDYTPRK

SEQ ID NO: 282 - protein, 101 aa, Artificial Sequence
  Synthetic
MAVKHLIVLKFKDEITEDQKEEFFKRYVSLVNRIPAMKDVYWGKDVTQKNKHEGFTHIVEVTFESVETIADYIGHPAHVAFGNVARSFWEKLLIFDYTPRK

SEQ ID NO: 283 - protein, 101 aa, Artificial Sequence
  Synthetic
MAVKHLIVLKFKDEITEAQKEEFFKRYVNLVNHIPAMKDVYWGKDVTQKNKHEGFTHIVEVTFESVETIADYIIHPAHVGFGKVYRSFWEKLLIFDYTPRK

SEQ ID NO: 284 - protein, 101 aa, Artificial Sequence
  Synthetic
MAVKHLIVLKFKDEITEDQKEEFFKRYVNLVNRIPAMKDVYWGKDVTQKNKHEGFTHIVEVTFESVETIADYIIHPAHVAFGNKYRSFWEKLLIFDYTPRK

SEQ ID NO: 285 - protein, 101 aa, Artificial Sequence
  Synthetic
MAVKHLIVLKFKDEITEDQKEEFFKRYVSLVNRIPAMKDVYWGKDVTQKNKHEGFTHIVEVTFESVETIADYIGHPAHVAFGNFARSFWEKLLIFDYTPRK

SEQ ID NO: 286 - protein, 101 aa, Artificial Sequence
  Synthetic
MAVKHLIVLKFKDEITEAQKEEFFKRYVNLVNIIPAMKDVYWGKDVTQKNKHEGFTHIVEVTFESVETIQDYIIHPAHVAFGKVARSFWEKLLIFDYTPRK

SEQ ID NO: 287 - protein, 101 aa, Artificial Sequence
  Synthetic
MAVKHLIVLKFKDEITEAQKEEFMKRYVNLVNHIPAMKDVYWGKDVTQKNKHEGFTHIVEVTFESVETIADYIIHPAHVAFGKVARSFWEKLLIFDYTPRK

SEQ ID NO: 288 - protein, 101 aa, Artificial Sequence
  Synthetic
MAVKHLIVLKFKDEITEAQKEEFFKTYVNLVNHIPAMKDVYWGKDVTQKNKHEGFTHIVEVTFESVETIQDYIIHPAHVAFGKVARSFWEKLLIFDYTPRK

SEQ ID NO: 289 - protein, 101 aa, Artificial Sequence
  Synthetic
MAVKHLIVLKFKDEITEAQKEEFFKTYVNLVNRIPAMKDVYWGKDVTQKNKHEGFTHIVEVTFESVETIADYIIHPAHVAFGKKYRSFWEKLLIFDYTPRK

SEQ ID NO: 290 - protein, 101 aa, Artificial Sequence
  Synthetic
MAVKHLIVLKFKDEITEDQKEEFMKRYVNLVNRIPAMKDVYWGKDVTQKNKHEGFTHIVEVTFESVETIADYIIHPAHVAFGEVARSFWEKLLIFDYTPRK

SEQ ID NO: 291 - protein, 101 aa, Artificial Sequence
  Synthetic
MAVKHLIVLKFKDEITEAQKEEFFKRYVNLVNRIPAMKDVYWGKDVTQKNKHEGFTHIVEVTFESVETIADYIGHPAHVAFGNKARSFWEKLLIFDYTPRK

SEQ ID NO: 292 - protein, 101 aa, Artificial Sequence
  Synthetic
MAVKHLIVLKFKDEITEAQKEEFFKRYVNLVNIIPAMKDVYWGKDVTQQNKHEGFTHIVEVTFESVETIADYIIHPAHVAFGNVARSFWEKLLIFDYTPRK

SEQ ID NO: 293 - protein, 101 aa, Artificial Sequence
  Synthetic
MAVKHLIVLKFKDEITEAQKEEFFKRYVNLVNHIPAMKDVYWGKDVTQKNKHEGFTHIVEVTFESVETIQDYIIHPAHVAFGNVARSFWEKLLIFDYTPRK

SEQ ID NO: 294 - protein, 101 aa, Artificial Sequence
  Synthetic
MAVKHLIVLKFKDEITEAQKEEFFKTYVNLVNRIPAMKDVYWGKDVTQKNKHEGFTHIVEVTFESVETIADYIGHPAHVGFGKVYRSFWEKLLIFDYTPRK

SEQ ID NO: 295 - protein, 101 aa, Artificial Sequence
  Synthetic
MAVKHLIVLKFKDEITEAQKEEFFKTYVNLVNIIPAMKDVYWGKDVTQKNKHEGFTHIVEVTFESVETIQDYIGHPAHVAFGKVARSFWEKLLIFDYTPRK

SEQ ID NO: 296 - protein, 101 aa, Artificial Sequence
  Synthetic
MAVKHLIVLKFKDEITEAQKEEFFKRYVNLVNHIPAMKDVYWGKDVTQKNKHEGFTHIVEVTFESVETIADYIIHPAHVAFGDVARSFWEKLLIFDYTPRK

SEQ ID NO: 297 - protein, 101 aa, Artificial Sequence
  Synthetic
MAVKHLIVLKFKDEITEAQKEEFFKRYVNLVNIIPAMKDVYWGKDVTQKNKHEGFTHIVEVTFESVETIADYIIHPAHVAFGNKARSFWEKLLIFDYTPRK

SEQ ID NO: 298 - protein, 101 aa, Artificial Sequence
  Synthetic
MAVKHLIVLKFKDEITEAQKEEFFKTYVNLVNIIPAMKDVYWGKDVTQKNKHEGFTHIVEVTFESVETIADYIIHPAHVGFGKFARSFWEKLLIFDYTPRK

SEQ ID NO: 299 - protein, 101 aa, Artificial Sequence
  Synthetic
MAVKHLIVLKFKDEITEDQKEEFFKRYVNLVNIIPAMKDVYWGKDVTQKNKHEGFTHIVEVTFESVETIADYIGHPAHVAFGNVARSFWEKLLIFDYTPRK

SEQ ID NO: 300 - protein, 101 aa, Artificial Sequence
  Synthetic
MAVKHLIVLKFKDEITEAQKEEFMKRYVNLVNIIPAMKDVYWGKDVTQKNKHEGFTHIVEVTFESVETIQDYIIHPAHVAFGKVYRSFWEKLLIFDYTPRK

SEQ ID NO: 301 - protein, 101 aa, Artificial Sequence
  Synthetic
MAVKHLIVLKFKDEITEDQKEEFFKRYVSLVNRIPAMKDVYWGKDVTQKNKHEGFTHIVEVTFESVETIAQYIGHPAHVAFGNKARSFWEKLLIFDYTPRK

SEQ ID NO: 302 - protein, 101 aa, Artificial Sequence
  Synthetic
MAVKHLIVLKFKDEITEDQKEEFFKRYVNLVNRIPAMKDVYWGKDVTQKNKHEGFTHIVEVTFESVETIADYIGHPAHVAFGNVYRSFWEKLLIFDYTPRK

SEQ ID NO: 303 - protein, 101 aa, Artificial Sequence
  Synthetic
MAVKHLIVLKFKDEITEDQKEEFFKRYVSLVNHIPAMKDVYWGKDVTQKNKHEGFTHIVEVTFESVETIADYIIHPAHVAFGNFARSFWEKLLIFDYTPRK

SEQ ID NO: 304 - protein, 101 aa, Artificial Sequence
  Synthetic
MAVKHLIVLKFKDEITEDQKEEFFKRYVNLVNIIPAMKDVYWGKDVTQKNKHEGFTHIVEVTFESVETIADYIIHPAHVAFGKVARSFWEKLLIFDYTPRK

SEQ ID NO: 305 - protein, 101 aa, Artificial Sequence
  Synthetic
MAVKHLIVLKFKDEITEAQKEEFFKRYVNLVNHIPAMKDVYWGKDVTQKNKHEGFTHIVEVTFESVETIADYIIHPAHVAFGNFARSFWEKLLIFDYTPRK

SEQ ID NO: 306 - protein, 101 aa, Artificial Sequence
  Synthetic
MAVKHLIVLKFKDEITEDQKEEFFKRYVNLVNHIPAMKDVYWGKDVTQKNKHEGFTHIVEVTFESVETIADYIIHPAHVAFGKFARSFWEKLLIFDYTPRK

SEQ ID NO: 307 - protein, 101 aa, Artificial Sequence
  Synthetic
MAVKHLIVLKFKDEITEDQKEEFFKRYVNLVNHIPAMKDVYWGKDVTQKNKHEGFTHIVEVTFESVETIADYIIHPAHVAFGKKARSFWEKLLIFDYTPRK

SEQ ID NO: 308 - protein, 101 aa, Artificial Sequence
  Synthetic
MAVKHLIVLKFKDEITEDQKEEFMKRYVNLVNHIPAMKDVYWGKDVTQKNKHEGFTHIVEVTFESVETIADYIIHPAHVAFGNVYRSFWEKLLIFDYTPRK

SEQ ID NO: 309 - protein, 101 aa, Artificial Sequence
  Synthetic
MAVKHLIVLKFKDEITEDQKEEFMKRYVSLVNHIPAMKDVYWGKDVTQKNKHEGFTHIVEVTFESVETIADYIIHPAHVAFGNKARSFWEKLLIFDYTPRK

SEQ ID NO: 310 - protein, 101 aa, Artificial Sequence
  Synthetic
MAVKHLIVLKFKDEITEDQKEKFFKAYVSLVNIIPAMKDVYWGKDVTQKNKEEGYTHIVEVTFESVETILDYIIHPAHVGFKAVYRSFWEKLLIFDYTPRK

SEQ ID NO: 311 - protein, 101 aa, Artificial Sequence
  Synthetic
MAVKHLIVLKFKDEITEAQKEEFFKTYVNLVNHIPAMKDVYWGKDVTQKNKHEGFTHIVEVTFESVETIADYIIHPAHVAFGNKARSFWEKLLIFDYTPRK

SEQ ID NO: 312 - protein, 101 aa, Artificial Sequence
  Synthetic
MAVKHLIVLKFKDEITEAQKEKFFKTYVNLVNIIPAMKDVYWGKDVTQQNKEEGYTHIVETTFESVETIADYIIHPAHVGFGQFYRSFWEKLLIFDYTPRK

SEQ ID NO: 313 - protein, 101 aa, Artificial Sequence
  Synthetic
MAVKHLIVLKFKDEITEDQKEEFFKRYVSLVNRIPAMKDVYWGKDVTQQNKHEGFTHIVEVTFESVETIADYIGHPAHVAFGNKARSFWEKLLIFDYTPRK

SEQ ID NO: 314 - protein, 101 aa, Artificial Sequence
  Synthetic
MAVKHLIVLKFKDEITEDQKEEFMKRYVSLVNHIPAMKDVYWGKDVTQKNKHEGFTHIVEVTFESVETIADYIIHPAHVAFGNFARSFWEKLLIFDYTPRK

SEQ ID NO: 315 - protein, 101 aa, Artificial Sequence
  Synthetic
MAVKHLIVLKFKDEITEDQKEEFFKRYVSLVNRIPAMKDVYWGKDVTQKNKHEGFTHIVEVTFESVETIAQYIGHPAHVAFKNFARSFWEKLLIFDYTPRK

SEQ ID NO: 316 - protein, 101 aa, Artificial Sequence
  Synthetic
MAVKHLIVLKFKDEITEDQKEEFFKTYVNLVNHIPAMKDVYWGKDVTQQNKHEGFTHIVEVTFESVETIADYIIHPAHVAFGNVARSFWEKLLIFDYTPRK

SEQ ID NO: 317 - protein, 101 aa, Artificial Sequence
  Synthetic
MAVKHLIVLKFKDEITEDQKEEFMKRYVSLVNHIPAMKDVYWGKDVTQKNKHEGFTHIVEVTFESVETIADYIGHPAHVAFGNKARSFWEKLLIFDYTPRK

SEQ ID NO: 318 - protein, 101 aa, Artificial Sequence
  Synthetic
MAVKHLIVLKFKDEITEDQKEEFFKAYESLVNIIPAMKDVYWGKDVTQKNKEHGYTHIVEVTFESVETILDYIIHPAHVAFKAVYRKFWEKLLIFDYTPRK

SEQ ID NO: 319 - protein, 101 aa, Artificial Sequence
  Synthetic
MAVKHLIVLKFKDEITEDQKEEFFKRYVNLVNHIPAMKDVYWGKDVTQQNKHEGFTHIVEVTFESVETIAQYIGHPAHVAFGNKARSFWEKLLIFDYTPRK

SEQ ID NO: 320 - protein, 101 aa, Artificial Sequence
  Synthetic
MAVKHLIVLKFKDEITEAQKEEFFKTYVSLVNRIPAMKDVYWGKDVTQKNKHEGFTHIVEVTFESVETIADYIIHPAHVAFGKVARSFWEKLLIFDYTPRK

SEQ ID NO: 321 - protein, 101 aa, Artificial Sequence
  Synthetic
MAVKHLIVLKFKDEITEDQKEEFMKTYVNLVNRIPAMKDVYWGKDVTQKNKHEGFTHIVEVTFESVETIADYIGHPAHVAFGNVARSFWEKLLIFDYTPRK

SEQ ID NO: 322 - protein, 101 aa, Artificial Sequence
  Synthetic
MAVKHLIVLKFKDEITEDQKEEFFKAYVSLVNIIPAMKDVYWGKDVTQKNKEHGYTHIVEVTFESVETILDYIIHPAHVGFKEVYRKFWEKLLIFDYTPRK

SEQ ID NO: 323 - protein, 101 aa, Artificial Sequence
  Synthetic
MAVKHLIVLKFKDEITEAQKEEFFKRYVNLVNRIPAMKDVYWGKDVTQQNKHEGFTHIVEVTFESVETIADYIGHPAHVAFGNVARSFWEKLLIFDYTPRK

SEQ ID NO: 324 - protein, 101 aa, Artificial Sequence
  Synthetic
MAVKHLIVLKFKDEITEDQKEKFFKTYVSLVNRIPAMKDVYWGKDVTQKNKEEGYTHIVEVTFESVETILDYIIHPAHVGFKRVYRKYWEKLLIFDYTPRK

SEQ ID NO: 325 - protein, 101 aa, Artificial Sequence
  Synthetic
MAVKHLIVLKFKDEITEDQKEEFFKAYESLVNIIPAMKDVYWGKDVTQKNKEEGYTHIVEVTFESVETILDYIIHPAHVGFKQVYRKFWEKLLIFDYTPRK

SEQ ID NO: 326 - protein, 101 aa, Artificial Sequence
  Synthetic
MAVKHLIVLKFKDEITEDQKEEFFKAYVSLVNIIPAMKDVYWGKDVTQKNKEEGYTHIVEVTFESVETILDYIIHPAHVGFKRVYRKFWEKLLIFDYTPRK

SEQ ID NO: 327 - protein, 101 aa, Artificial Sequence
  Synthetic
MAVKHLIVLKFKDEITEAQKEKFFKRYVNLVNHIPAMKDVYWGKDVTQKKKEEGYTHIVEVTFESVETIQQYIIHPAHVAFGEVYRSFWEKLLIFDYYPRK

SEQ ID NO: 328 - protein, 101 aa, Artificial Sequence
  Synthetic
MAVKHLIVLKFKDEITEDQKEEFFKRYVNLVNRIPAMKDVYWGKDVTQKNKHEGFTHIVEVTFESVETIAQYIGHPAHVAFGNKARSFWEKLLIFDYTPRK

SEQ ID NO: 329 - protein, 101 aa, Artificial Sequence
  Synthetic
MAVKHLIVLKFKDEITEDQKEEFMKRYVNLVNHIPAMKDVYWGKDVTQKNKHEGFTHIVEVTFESVETIADYIIHPAHVAFGNVARSFWEKLLIFDYTPRK

SEQ ID NO: 330 - protein, 101 aa, Artificial Sequence
  Synthetic
MAVKHLIVLKFKDEITEDQKEEFFKAYESLVNIIPAMKDVYWGKDVTQKNKEEGYTHIVEVTFESVETIADYIIHPAHVGFKAVYRKFWEKLLIFDYTPRK

SEQ ID NO: 331 - protein, 101 aa, Artificial Sequence
  Synthetic
MAVKHLIVLKFKDEITEDQKEEFFKRYVSLVNHIPAMKDVYWGKDVTQQNKHEGFTHIVEVTFESVETIADYIIHPAHVAFGNFARSFWEKLLIFDYTPRK

SEQ ID NO: 332 - protein, 101 aa, Artificial Sequence
  Synthetic
MAVKHLIVLKFKDEITEDDKEEFMKTYVSLVNIIPAMKDVYWGKDVTQKKKEEGFTHIVEVTFESVETIADYIGHPAHVVFGEKYRSFWEKLLIFDYTPRK

SEQ ID NO: 333 - protein, 101 aa, Artificial Sequence
  Synthetic
MAVKHLIVLKFKDEITEAQKEEFMKTYVNLVNIIPAMKDVYWGKDVTQKNKHEGFTHIVEVTFESVETIADYIIHPAHVAFGKVARSFWEKLLIFDYTPRK

SEQ ID NO: 334 - protein, 101 aa, Artificial Sequence
  Synthetic
MAVKHLIVLKFKDEITEDQKEKFFKTYVSLVNIIPAMKDVYWGKDVTQKNKEEGYTHIVEVTFESVETIADYIIHPAHVGFKRVYRKYWEKLLIFDYTPRK

SEQ ID NO: 335 - protein, 101 aa, Artificial Sequence
  Synthetic
MAVKHLIVLKFKDEITEDQKEEFFKAYESLVNIIPAMKDVYWGKDVTQKNKEHGYTHIVEVTFESVETILDYIIHPAHVGFKEVYRKFWEKLLIFDYTPRK

SEQ ID NO: 336 - protein, 101 aa, Artificial Sequence
  Synthetic
MAVKHLIVLKFKDEITEDQKEEFMKRYVSLVNRIPAMKDVYWGKDVTQKNKHEGFTHIVEVTFESVETIAQYIGHPAHVAFGNKARSFWEKLLIFDYTPRK

SEQ ID NO: 337 - protein, 101 aa, Artificial Sequence
  Synthetic
MAVKHLIVLKFKDEITEDQKEEFFKRYVSLVNRIPAMKDVYWGKDVTQKNKHEGFTHIVEVTFESVETIADYIGHPAHVAFGNKARSFWEKLLIFDYTPRK

SEQ ID NO: 338 - protein, 101 aa, Artificial Sequence
  Synthetic
MAVKHLIVLKFKKEITEDQKKKFFATYVSLVNIIPAMLDVYWGKDVTQKNKEEGFTHIVETTFESVETILQYIGHPAHVAFKAKYRSFWEKLLIFDYTPRK

SEQ ID NO: 339 - protein, 101 aa, Artificial Sequence
  Synthetic
MAVKHLIVLKFKDEITEDQKEEFFKRYVNLVNRIPAMKDVYWGKDVTQKNKHEGFTHIVEVTFESVETIADYIGHPAHVAFGNFARSFWEKLLIFDYTPRK

SEQ ID NO: 340 - protein, 101 aa, Artificial Sequence
  Synthetic
MAVKHLIVLKFKDEITEAQKEEFFKRYVNLVNRIPAMKDVYWGKDVTQKNKHEGFTHIVEVTFESVETIADYIIHPAHVAFGKVARSFWEKLLIFDYTPRK

SEQ ID NO: 341 - protein, 101 aa, Artificial Sequence
  Synthetic
MAVKHLIVLKFKDEITEAQKEEFFKRYVNLVNHIPAMKDVYWGKDVTQKNKHEGFTHIVEVTFESVETIADYIIHPAHVAFGEVARSFWEKLLIFDYTPRK

SEQ ID NO: 342 - protein, 101 aa, Artificial Sequence
  Synthetic
MAVKHLIVLKFKDEITEAQKEEFFKTYVNLVNIIPAMKDVYWGKDVTQQNKHEGFTHIVEVTFESVETIQDYIIHPAHVAFGKVARSFWEKLLIFDYTPRK

SEQ ID NO: 343 - protein, 101 aa, Artificial Sequence
  Synthetic
MAVKHLIVLKFKDEITEAQKEEFFKRYVNLVNRIPAMKDVYWGKDVTQKNKEEGFTHIVEVTFESVETIADYIIHPAHVAFGKVARSFWEKLLIFDYTPRK

SEQ ID NO: 344 - protein, 101 aa, Artificial Sequence
  Synthetic
MAVKHLIVLKFKREITEDQKEEFFKTYVSLVNIIPAMKDVYWGKDVTQKNKEEGYTHIVEVTFESVETILQYIIHPAHVAFGKVYRSFWEKLLIFDYTPRK

SEQ ID NO: 345 - protein, 101 aa, Artificial Sequence
  Synthetic
MAVKHLIVLKFKDEITEAQKEKFFKHYVSLVNIIPAMKGVYWGKDVTQQNKHEGYTHIVEVTFESVETIQDYIIHPAHVGFGNKYRSFWEKLLIFDYTPRK

SEQ ID NO: 346 - protein, 101 aa, Artificial Sequence
  Synthetic
MAVKHLIVLKFKDEITEDQKEKFFKTYVSLVNIIPAMKDVYWGKDVTQKNKEEGYTHIVEVTFESVETILDYIIHPAHVGFKKVYRKFWEKLLIFDYTPRK

SEQ ID NO: 347 - protein, 101 aa, Artificial Sequence
  Synthetic
MAVKHLIVLKFKDEITEDQKEEFFKAYVSLVNIIPAMKDVYWGKDVTQKNKEEGYTHIVEVTFESVETILDYIIHPAHVGFKAVYRKFWEKLLIFDYTPRK

SEQ ID NO: 348 - protein, 101 aa, Artificial Sequence
  Synthetic
MAVKHLIVLKFKDEITEDQKEKFFKTYVSLVNIIPAMKDVYWGKDVTQKNKEEGYTHIVEVTFESVETILDYIIHPAHVGFKQVYRKYWEKLLIFDYTPRK

SEQ ID NO: 349 - protein, 101 aa, Artificial Sequence
  Synthetic
MAVKHLIVLKFKDEITEAQKEEFFKRYVNLVNHIPAMKDVYWGKDVTQKNKEEGFTHIVEVTFESVETIADYIIHPAHVAFGKVARSFWEKLLIFDYTPRK

SEQ ID NO: 350 - protein, 101 aa, Artificial Sequence
  Synthetic
MAVKHLIVLKFKDEITEDQKEEFFKRYVNLVNRIPAMKDVYWGKDVTQKNKHEGFTHIVEVTFESVETIADYIIHPAHVAFGKKARSFWEKLLIFDYTPRK

SEQ ID NO: 351 - protein, 101 aa, Artificial Sequence
  Synthetic
MAVKHLIVLKFKDEITEDQKEEFFKRYVNLVNHIPAMKDVYWGKDVTQKNKHEGFTHIVEVTFESVETIADYIIHPAHVAFGKVYRSFWEKLLIFDYTPRK

SEQ ID NO: 352 - protein, 101 aa, Artificial Sequence
  Synthetic
MAVKHLIVLKFKDEITEAQKEEFFKTYVNLVNRIPAMKDVYWGKDVTQKNKHEGFTHIVEVTFESVETIADYIIHPAHVAFGNFARSFWEKLLIFDYTPRK

SEQ ID NO: 353 - protein, 101 aa, Artificial Sequence
  Synthetic
MAVKHLIVLKFKDEITEDQKEEFFKRYVNLVNRIPAMKDVYWGKDVTQKNKHEGFTHIVEVTFESVETIADYIIHPAHVAFGKFARSFWEKLLIFDYTPRK

SEQ ID NO: 354 - protein, 101 aa, Artificial Sequence
  Synthetic
MAVKHLIVLKFKDEITEAQKEEFFKRYVNLVNRIPAMKDVYWGKDVTQKNKHEGYTHIVEVTFESVETIQDYIIHPAHVAFGNVARSFWEKLLIFDYTPRK

SEQ ID NO: 355 - protein, 101 aa, Artificial Sequence
  Synthetic
MAVKHLIVLKFKDEITEAQKEEFFKTYVNLVNHIPAMKDVYWGKDVTQKNKHEGFTHIVEVTFESVETIADYIIHPAHVAFGKVARSFWEKLLIFDYTPRK

SEQ ID NO: 356 - protein, 101 aa, Artificial Sequence
  Synthetic
MAVKHLIVLKFKDEITEAQKEEFMKTYVNLVNRIPAMKDVYWGKDVTQKNKHEGFTHIVEVTFESVETIADYIIHPAHVAFGKVARSFWEKLLIFDYTPRK

SEQ ID NO: 357 - protein, 101 aa, Artificial Sequence
  Synthetic
MAVKHLIVLKFKDEITEDQKEEFFKAYESLVNIIPAMKDVYWGKDVTQKNKEEGYTHIVEVTFESVETILDYIIHPAHVGFKNVYRKFWEKLLIFDYTPRK

SEQ ID NO: 358 - protein, 101 aa, Artificial Sequence
  Synthetic
MAVKHLIVLKFKDEITEDQKEEFFKAYVSLVNIIPAMKDVYWGKDVTQKNKEEGYTHIVEVTFESVETILDYIIHPAHVGFKEVYRKFWEKLLIFDYTPRK

SEQ ID NO: 359 - protein, 101 aa, Artificial Sequence
  Synthetic
MAVKHLIVLKFKDEITEDQKEKFFKTYVSLVNIIPAMKDVYWGKDVTQKNKEEGYTHIVEVTFESVETILDYIIHPAHVGFKGVYRKFWEKLLIFDYTPRK

SEQ ID NO: 360 - protein, 101 aa, Artificial Sequence; identical to SEQ ID NO: 97
  Synthetic

SEQ ID NO: 361 - protein, 101 aa, Artificial Sequence
  Synthetic
MAVKHLIVLKFKDEITEDQKEEFFKRYVNLVNHIPAMKDVYWGKDVTQKNKHEGFTHIVEVTFESVETIADYIIHPAHVAFGEVARSFWEKLLIFDYTPRK

SEQ ID NO: 362 - protein, 101 aa, Artificial Sequence
  Synthetic
MAVKHLIVLKFKDEITEAQKEEFFKRYHNLVNIIPAMKDVYWGKDVTQKNKHEGFTHIVEVTFESVETIADYIIHPAHVAFGKVYRSFWEKLLIFDYTPRK

SEQ ID NO: 363 - protein, 101 aa, Artificial Sequence
  Synthetic
MAVKHLIVLKFKDEITEAQKEEFFKTYHNLVNHIPAMKDVYWGKDVTQKNKHEGFTHIVEVTFESVETIADYIIHPAHVAFGKVYRSFWEKLLIFDYTPRK

SEQ ID NO: 364 - protein, 101 aa, Artificial Sequence
  Synthetic
MAVKHLIVLKFKDEITEAQKEEFFKTYVNLVNHIPAMKDVYWGKDVTQKNKHEGFTHIVEVTFESVETIADYIIHPAHVVFGKVYRSFWEKLLIFDYTPRK

SEQ ID NO: 365 - protein, 101 aa, Artificial Sequence
  Synthetic
MAVKHLIVLKFKDEITEDQKEEFFKRYVNLVNIIPAMKDVYWGKDVTQKNKHEGFTHIVEVTFESVETIADYIIHPAHVAFGNKARSFWEKLLIFDYTPRK

SEQ ID NO: 366 - protein, 101 aa, Artificial Sequence
  Synthetic
MAVKHLIVLKFKDEITEDQKEKFFKTYVSLVNRIPAMKDVYWGKDVTQKNKEEGYTHIVEVTFESVETILDYIIHPAHVGFKRVYRKFWEKLLIFDYTPRK

SEQ ID NO: 367 - protein, 101 aa, Artificial Sequence
  Synthetic
MAVKHLIVLKFKDEITEDQKEEFFKRYVNLVNHIPAMKDVYWGKDVTQKNKHEGFTHIVEVTFESVETIAQYIGHPAHVAFGNKARSFWEKLLIFDYTPRK

SEQ ID NO: 368 - protein, 101 aa, Artificial Sequence
  Synthetic
MAVKHLIVLKFKDEITEAQKEEFMKRYVNLVNRIPAMKDVYWGKDVTQKNKHEGFTHIVEVTFESVETIADYIIHPAHVAFGNVYRSFWEKLLIFDYTPRK

SEQ ID NO: 369 - protein, 101 aa, Artificial Sequence
  Synthetic
MAVKHLIVLKFKDEITEAQKEEFMKTYVNLVNHIPAMKDVYWGKDVTQKNKHEGFTHIVEVTFESVETIADYIIHPAHVAFGKVYRSFWEKLLIFDYTPRK

SEQ ID NO: 370 - protein, 101 aa, Artificial Sequence
  Synthetic
MAVKHLIVLKFKDEITEAQKEEFMKRYVNLVNHIPAMKDVYWGKDVTQKNKHEGFTHIVEVTFESVETIADYIIHPAHVAFGNVARSFWEKLLIFDYTPRK

SEQ ID NO: 371 - protein, 101 aa, Artificial Sequence
  Synthetic
MAVKHLIVLKFKDEITEAQKEEFFKTYVNLVNHIPAMKDVYWGKDVTQKNKHEGFTHIVEVTFESVETIADYIGHPAHVAFGKVYRSFWEKLLIFDYTPRK

SEQ ID NO: 372 - protein, 101 aa, Artificial Sequence
  Synthetic
MAVKHLIVLKFKDEITEDQKEEFMKRYVNLVNRIPAMKDVYWGKDVTQKNKHEGFTHIVEVTFESVETIAQYIGHPAHVAFGNFARSFWEKLLIFDYTPRK

SEQ ID NO: 373 - protein, 101 aa, Artificial Sequence
  Synthetic
MAVKHLIVLKFKDEITEAQKEEFFKRYVNLVNRIPAMKDVYWGKDVTQKNKHEGFTHIVEVTFESVETIADYIIHPAHVAFGKVYRSFWEKLLIFDYTPRK

SEQ ID NO: 374 - protein, 101 aa, Artificial Sequence
  Synthetic
MAVKHLIVLKFKDEITEDQKEEFMKRYVNLVNHIPAMKDVYWGKDVTQKNKHEGFTHIVEVTFESVETIADYIGHPAHVAFGNKARSFWEKLLIFDYTPRK

SEQ ID NO: 375 - protein, 101 aa, Artificial Sequence
  Synthetic
MAVKHLIVLKFKDEITEDQKEEFFKRYVNLVNHIPAMKDVYWGKDVTQKNKHEGFTHIVEVTFESVETIADYIGHPAHVAFGNVYRSFWEKLLIFDYTPRK

SEQ ID NO: 376 - protein, 101 aa, Artificial Sequence
  Synthetic
MAVKHLIVLKFKDEITEAQKEEFFKRYVNLVNIIPAMKDVYWGKDVTQKNKHEGFTHIVEVTFESVETIADYIIHPAHVAFGKVARSFWEKLLIFDYTPRK

SEQ ID NO: 377 - protein, 101 aa, Artificial Sequence
  Synthetic
MAVKHLIVLKFKDEITEAQKEEFFKTYVNLVNHIPAMKDVYWGKDVTQKNKHEGFTHIVEVTFESVETIADYIIHPAHVAFGKFYRSFWEKLLIFDYTPRK

SEQ ID NO: 378 - protein, 101 aa, Artificial Sequence
  Synthetic
MAVKHLIVLKFKDEITEDQKEEFFKTYVNLVNRIPAMKDVYWGKDVTQKNKHEGFTHIVEVTFESVETIADYIGHPAHVAFGNKARSFWEKLLIFDYTPRK

SEQ ID NO: 379 - protein, 101 aa, Artificial Sequence
  Synthetic
MAVKHLIVLKFKDEITEDQKEEFFKRYVNLVNRIPAMKDVYWGKDVTQKNKHEGFTHIVEVTFESVETIADYIIHPAHVAFGNFYRSFWEKLLIFDYTPRK

SEQ ID NO: 380 - protein, 101 aa, Artificial Sequence
  Synthetic
MAVKHLIVLKFKDEITEDQKEKFFKHYVSLVNIIPAMKDVYWGKDVTQKNKEEGYTHIVEVTFESVETILDYIIHPAHVGFKRVYRKYWEKLLIFDYTPRK

SEQ ID NO: 381 - protein, 101 aa, Artificial Sequence
  Synthetic
MAVKHLIVLKFKDEITEDQKEEFFKTYVNLVNHIPAMKDVYWGKDVTQKNKHEGFTHIVEVTFESVETIADYIIHPAHVAFGNFARSFWEKLLIFDYTPRK

SEQ ID NO: 382 - protein, 101 aa, Artificial Sequence
  Synthetic
MAVKHLIVLKFKDEITEDQKEEFFKRYVNLVNHIPAMKDVYWGKDVTQQNKHEGFTHIVEVTFESVETIADYIIHPAHVAFGNVARSFWEKLLIFDYTPRK

SEQ ID NO: 383 - protein, 101 aa, Artificial Sequence
  Synthetic
MAVKHLIVLKFKDEITEDQKEEFMKRYVSLVNHIPAMKDVYWGKDVTQQNKHEGFTHIVEVTFESVETIADYIIHPAHVAFGNFARSFWEKLLIFDYTPRK

SEQ ID NO: 384 - protein, 101 aa, Artificial Sequence
  Synthetic
MAVKHLIVLKFKDEITEAQKEEFFKRYVNLVNRIPAMKDVYWGKDVTQKNKHEGFTHIVEVTFESVETIQDYIIHPAHVAFGNVARSFWEKLLIFDYTPRK

SEQ ID NO: 385 - protein, 101 aa, Artificial Sequence
  Synthetic
MAVKHLIVLKFKDEITEAQKEEFFKRYVNLVNHIPAMKDVYWGKDVTQKNKHEGFTHIVEVTFESVETIADYIIHPAHVAFGKVARSFWEKLLIFDYTPRK

SEQ ID NO: 386 - protein, 101 aa, Artificial Sequence
  Synthetic
MAVKHLIVLKFKDEITEDQKEEFFKRYVNLVNRIPAMKDVYWGKDVTQKNKHEGFTHIVEVTFESVETIAQYIGHPAHVAFGNVARSFWEKLLIFDYTPRK

SEQ ID NO: 387 - protein, 101 aa, Artificial Sequence
  Synthetic
MAVKHLIVLKFKDEITEDQKEKFFKTYVSLVNIIPAMKDVYWGKDVTQKNKEEGYTHIVEVTFESVETILDYIIHPAHVGFKNVYRKFWEKLLIFDYTPRK

SEQ ID NO: 388 - protein, 101 aa, Artificial Sequence
  Synthetic
MAVKHLIVLKFKDEITEDQKEEFFKRYVNLVNRIPAMKDVYWGKDVTQKNKHEGFTHIVEVTFESVETIADYIIHPAHVAFGNKARSFWEKLLIFDYTPRK

SEQ ID NO: 389 - DNA, 306 bp, Artificial Sequence
  Synthetic
atggccgtcaagcatctgattgtattgaaatttaaggacgagatcacgaacgatcaaaaggaagaatttttcaaaacttatgttaatttattgaacaacatccctgctatgaaggatgtctactggggtaaggatgtgacacagaaaaacaaggaagaaggctacactcacattgtggaagttaccttcgagagcgttgaaactattcaatcctacatcatccaccccgctcatgtcggattcggtgctgtctatcgttccttttgggaaaaattgttgattttcgactataccccaagaaagtaa

SEQ ID NO: 390 - DNA, 306 bp, Artificial Sequence
  Synthetic
atggccgtcaagcatctgattgtattgaaatttaaggacgagatcacgaacgatcaaaaggaagaatttttcaaaacttatgttaatttagttaacataatccctgctatgaagcaagtctactggggtaaggatgtgacacagaaaaacaaggaagaaggctacactcacattgtggaagttaccttcgagagcgttgaaactattcaatcctacatcatccaccccgctcatgtcggattcggtgctttctatcgttccttttgggaaaaattgttgattttcgactataccccaagaaagtaa

SEQ ID NO: 391 - DNA, 306 bp, Artificial Sequence
  Synthetic
atggccgtcaagcatctgattgtattgaaatttaaggacgagatcacgaacgcacaaaaggaagaatttttcaaaacttatgttaatttattgaacaacatccctgctatgaagcaagtctactggggtaaggatgtgacacagaaaaacaaggaagaaggctacactcacattgtggaagttaccttcgagagcgttgaaactattcaatcctacatcatccaccccgctcatgtcggattcggtgatttctatcgttccttttgggaaaaattgttgattttcgactataccccaagaaagtaa

SEQ ID NO: 392 - DNA, 306 bp, Artificial Sequence
  Synthetic
atggccgtcaagcatctgattgtattgaaatttaaggacgagatcacggaagatcaaaaggaagaatttttcaaaacttatgttactttattgaacaacatccctgctatgaagcaagtctactggggtaaggatgtgacacagaaaaacaaggaagaaggctacactcacattgtggaagttaccttcgagagcgttgaaactattcaatcctacatcatccaccccgctcatgtcggattcggtgatgtctatcgttccttttgggaaaaattgttgattttcgactataccccaagaaagtaa

SEQ ID NO: 393 - DNA, 306 bp, Artificial Sequence
  Synthetic
atggccgtcaagcatctgattgtattgaaatttaaggacgagatcacgaacgatcaaaaggaagaatttttcaaaacttatgttactttattgaacataatccctgctatgaagcaagtctactggggtaaggatgtgacacagaaaaacaaggaagaaggctacactcacattgtggaagttaccttcgagagcgttgaaactattcaagactacatcatccaccccgctcatgtcggattcggtgatttctatcgttccttttgggaaaaattgttgattttcgactataccccaagaaagtaa

SEQ ID NO: 394 - DNA, 306 bp, Artificial Sequence
  Synthetic
atggccgtcaagcatctgattgtattgaaatttaaggacgagatcacgaacgcacaaaaggaagaatttttcaaaacttatgttactttattgaacaacatccctgctatgaagcaagtctactggggtaaggatgtgacacagaaaaacaaggaagaaggctacactcacattgtggaagttaccttcgagagcgttgaaactattcaagactacatcatccaccccgctcatgtcggattcggtgatttctatcgttccttttgggaaaaattgttgattttcgactataccccaagaaagtaa

SEQ ID NO: 395 - DNA, 306 bp, Artificial Sequence
  Synthetic
atggccgtcaagcatctgattgtattgaaatttaaggacgagatcacgaacgcacaaaaggaagaatttttcaaaacttatgttaatttattgaacaacatccctgctatgaagcaagtctactggggtaaggatgtgacacagaaaaacaaggaagaaggctacactcacattgtggaagttaccttcgagagcgttgaaactattcaagactacatcatccaccccgctcatgtcggattcggtgctttctatcgttccttttgggaaaaattgttgattttcgactataccccaagaaagtaa

SEQ ID NO: 396 - DNA, 306 bp, Artificial Sequence
  Synthetic
atggccgtcaagcatctgattgtattgaaatttaaggacgagatcacggaagatcaaaaggaagaatttttcaaaacttatgttactttattgaacaacatccctgctatgaaggatgtctactggggtaaggatgtgacacagaaaaacaaggaagaaggctacactcacattgtggaagttaccttcgagagcgttgaaactattcaatcctacatcatccaccccgctcatgtcggattcggtgatttctatcgttccttttgggaaaaattgttgattttcgactataccccaagaaagtaa

SEQ ID NO: 397 - DNA, 306 bp, Artificial Sequence
  Synthetic
atggccgtcaagcatctgattgtattgaaatttaaggacgagatcacgaacgatcaaaaggaagaatttttcaaaacttatgttactttattgaacaacatccctgctatgaaggatgtctactggggtaaggatgtgacacagaaaaacaaggaagaaggctacactcacattgtggaagttaccttcgagagcgttgaaactattcaagactacatcatccaccccgctcatgtcggattcggtgctgtctatcgttccttttgggaaaaattgttgattttcgactataccccaagaaagtaa

SEQ ID NO: 398 - DNA, 306 bp, Artificial Sequence
  Synthetic
atggccgtcaagcatctgattgtattgaaatttaaggacgagatcacggaagatcaaaaggaagaatttttcaaaacttatgttactttagttaacaacatccctgctatgaaggatgtctactggggtaaggatgtgacacagaaaaacaaggaagaaggctacactcacattgtggaagttaccttcgagagcgttgaaactattcaatcctacatcatccaccccgctcatgtcggattcggtgctttctatcgttccttttgggaaaaattgttgattttcgactataccccaagaaagtaa

SEQ ID NO: 399 - DNA, 306 bp, Artificial Sequence
  Synthetic
atggccgtcaagcatctgattgtattgaaatttaaggacgagatcacgaacgatcaaaaggaagaatttttcaaaacttatgttaatttattgaacaacatccctgctatgaaggatgtctactggggtaaggatgtgacacagaaaaacaaggaagaaggctacactcacattgtggaagttaccttcgagagcgttgaaactattcaagactacatcatccaccccgctcatgtcggattcggtgctttctatcgttccttttgggaaaaattgttgattttcgactataccccaagaaagtaa

SEQ ID NO: 400 - DNA, 306 bp, Artificial Sequence
  Synthetic
atggccgtcaagcatctgattgtattgaaatttaaggacgagatcacggaagatcaaaaggaagaatttttcaaaacttatgttactttattgaacaacatccctgctatgaaggatgtctactggggtaaggatgtgacacagaaaaacaaggaagaaggctacactcacattgtggaagttaccttcgagagcgttgaaactattcaagactacatcatccaccccgctcatgtcggattcggtgctttctatcgttccttttgggaaaaattgttgattttcgactataccccaagaaagtaa

SEQ ID NO: 401 - DNA, 306 bp, Artificial Sequence
  Synthetic
atggccgtcaagcatctgattgtattgaaatttaaggacgagatcacgaacgcacaaaaggaagaatttttcaaaacttatgttaatttagttaacaacatccctgctatgaagcaagtctactggggtaaggatgtgacacagaaaaacaaggaagaaggctacactcacattgtggaagttaccttcgagagcgttgaaactattcaatcctacatcatccaccccgctcatgtcggattcggtgctttctatcgttccttttgggaaaaattgttgattttcgactataccccaagaaagtaa

SEQ ID NO: 402 - DNA, 306 bp, Artificial Sequence
  Synthetic
atggccgtcaagcatctgattgtattgaaatttaaggacgagatcacgaacgatcaaaaggaagaatttttcaaaacttatgttactttagttaacaacatccctgctatgaagcaagtctactggggtaaggatgtgacacagaaaaacaaggaagaaggctacactcacattgtggaagttaccttcgagagcgttgaaactattcaagactacatcatccaccccgctcatgtcggattcggtgatttctatcgttccttttgggaaaaattgttgattttcgactataccccaagaaagtaa

SEQ ID NO: 403 - DNA, 306 bp, Artificial Sequence
  Synthetic
atggccgtcaagcatctgattgtattgaaatttaaggacgagatcacggaagatcaaaaggaagaatttttcaaaacttatgttactttattgaacataatccctgctatgaagcaagtctactggggtaaggatgtgacacagaaaaacaaggaagaaggctacactcacattgtggaagttaccttcgagagcgttgaaactattcaatcctacatcatccaccccgctcatgtcggattcggtgatttctatcgttccttttgggaaaaattgttgattttcgactataccccaagaaagtaa

SEQ ID NO: 404 - DNA, 306 bp, Artificial Sequence
  Synthetic
atggccgtcaagcatctgattgtattgaaatttaaggacgagatcacggaagatcaaaaggaagaatttttcaaaacttatgttactttattgaacaacatccctgctatgaagcaagtctactggggtaaggatgtgacacagaaaaacaaggaagaaggctacactcacattgtggaagttaccttcgagagcgttgaaactattcaagactacatcatccaccccgctcatgtcggattcggtgatttctatcgttccttttgggaaaaattgttgattttcgactataccccaagaaagtaa

SEQ ID NO: 405 - DNA, 306 bp, Artificial Sequence
  Synthetic
atggccgtcaagcatctgattgtattgaaatttaaggacgagatcacgaacgcacaaaaggaagaatttttcaaaacttatgttactttattgaacaacatccctgctatgaaggatgtctactggggtaaggatgtgacacagaaaaacaaggaagaaggctacactcacattgtggaagttaccttcgagagcgttgaaactattcaatcctacatcatccaccccgctcatgtcggattcggtgatttctatcgttccttttgggaaaaattgttgattttcgactataccccaagaaagtaa

SEQ ID NO: 406 - DNA, 306 bp, Artificial Sequence
  Synthetic
atggccgtcaagcatctgattgtattgaaatttaaggacgagatcacgaacgatcaaaaggaagaatttttcaaaacttatgttactttattgaacaacatccctgctatgaaggatgtctactggggtaaggatgtgacacagaaaaacaaggaagaaggctacactcacattgtggaagttaccttcgagagcgttgaaactattcaagactacatcatccaccccgctcatgtcggattcggtgatttctatcgttccttttgggaaaaattgttgattttcgactataccccaagaaagtaa

SEQ ID NO: 407 - DNA, 306 bp, Artificial Sequence
  Synthetic
atggccgtcaagcatctgattgtattgaaatttaaggacgagatcacgaacgcacaaaaggaagaatttttcaaaacttatgttactttattgaacataatccctgctatgaagcaagtctactggggtaaggatgtgacacagaaaaacaaggaagaaggctacactcacattgtggaagttaccttcgagagcgttgaaactattcaatcctacatcatccaccccgctcatgtcggattcggtgatttctatcgttccttttgggaaaaattgttgattttcgactataccccaagaaagtaa

SEQ ID NO: 408 - DNA, 306 bp, Artificial Sequence
  Synthetic
atggccgtcaagcatctgattgtattgaaatttaaggacgagatcacggaagatcaaaaggaagaatttttcaaaacttatgttactttagttaacaacatccctgctatgaagcaagtctactggggtaaggatgtgacacagaaaaacaaggaagaaggctacactcacattgtggaagttaccttcgagagcgttgaaactattcaagactacatcatccaccccgctcatgtcggattcggtgctttctatcgttccttttgggaaaaattgttgattttcgactataccccaagaaagtaa

SEQ ID NO: 409 - DNA, 306 bp, Artificial Sequence
  Synthetic
atggccgtcaagcatctgattgtattgaaatttaaggacgagatcacgaacgcacaaaaggaagaatttttcaaaacttatgttactttattgaacaacatccctgctatgaaggatgtctactggggtaaggatgtgacacagaaaaacaaggaagaaggctacactcacattgtggaagttaccttcgagagcgttgaaactattcaatcctacatcatccaccccgctcatgtcggattcggtgctgtctatcgttccttttgggaaaaattgttgattttcgactataccccaagaaagtaa

SEQ ID NO: 410 - DNA, 306 bp, Artificial Sequence
  Synthetic
atggccgtcaagcatctgattgtattgaaatttaaggacgagatcacggaagcacaaaaggaagaatttttcaaaacttatgttactttattgaacaacatccctgctatgaagcaagtctactggggtaaggatgtgacacagaaaaacaaggaagaaggctacactcacattgtggaagttaccttcgagagcgttgaaactattcaatcctacatcatccaccccgctcatgtcggattcggtgatttctatcgttccttttgggaaaaattgttgattttcgactataccccaagaaagtaa

SEQ ID NO: 411 - DNA, 306 bp, Artificial Sequence
  Synthetic
atggccgtcaagcatctgattgtattgaaatttaaggacgagatcacggaagatcaaaaggaagaatttttcaaaacttatgttactttattgaacaacatccctgctatgaagcaagtctactggggtaaggatgtgacacagaaaaacaaggaagaaggctacactcacattgtggaagttaccttcgagagcgttgaaactattcaagactacatcatccaccccgctcatgtcggattcggtgctgtctatcgttccttttgggaaaaattgttgattttcgactataccccaagaaagtaa

SEQ ID NO: 412 - DNA, 306 bp, Artificial Sequence
  Synthetic
atggccgtcaagcatctgattgtattgaaatttaaggacgagatcacggaagatcaaaaggaagaatttttcaaaacttatgttactttattgaacataatccctgctatgaagcaagtctactggggtaaggatgtgacacagaaaaacaaggaagaaggctacactcacattgtggaagttaccttcgagagcgttgaaactattcaagactacatcatccaccccgctcatgtcggattcggtgctttctatcgttccttttgggaaaaattgttgattttcgactataccccaagaaagtaa

SEQ ID NO: 413 - DNA, 306 bp, Artificial Sequence
  Synthetic
atggccgtcaagcatctgattgtattgaaatttaaggacgagatcacggaagatcaaaaggaagaatttttcaaaacttatgttaatttattgaacataatccctgctatgaagcaagtctactggggtaaggatgtgacacagaaaaacaaggaagaaggctacactcacattgtggaagttaccttcgagagcgttgaaactattcaatcctacatcatccaccccgctcatgtcggattcggtgctttctatcgttccttttgggaaaaattgttgattttcgactataccccaagaaagtaa

SEQ ID NO: 414 - DNA, 306 bp, Artificial Sequence
  Synthetic
atggccgtcaagcatctgattgtattgaaatttaaggacgagatcacgaacgatcaaaaggaagaatttttcaaaacttatgttaatttagttaacaacatccctgctatgaagcaagtctactggggtaaggatgtgacacagaaaaacaaggaagaaggctacactcacattgtggaagttaccttcgagagcgttgaaactattcaagactacatcatccaccccgctcatgtcggattcggtgctttctatcgttccttttgggaaaaattgttgattttcgactataccccaagaaagtaa

SEQ ID NO: 415 - DNA, 306 bp, Artificial Sequence
  Synthetic
atggccgtcaagcatctgattgtattgaaatttaaggacgagatcacgaacgcacaaaaggaagaatttttcaaaacttatgttaatttattgaacaacatccctgctatgaagcaagtctactggggtaaggatgtgacacagaaaaacaaggaagaaggctacactcacattgtggaagttaccttcgagagcgttgaaactattcaatcctacatcatccaccccgctcatgtcggattcggtgctgtctatcgttccttttgggaaaaattgttgattttcgactataccccaagaaagtaa

SEQ ID NO: 416 - DNA, 306 bp, Artificial Sequence
  Synthetic
atggccgtcaagcatctgattgtattgaaatttaaggacgagatcacgaacgcacaaaaggaagaatttttcaaaacttatgttaatttattgaacaacatccctgctatgaaggatgtctactggggtaaggatgtgacacagaaaaacaaggaagaaggctacactcacattgtggaagttaccttcgagagcgttgaaactattcaatcctacatcatccaccccgctcatgtcggattcggtgctttctatcgttccttttgggaaaaattgttgattttcgactataccccaagaaagtaa

SEQ ID NO: 417 - DNA, 306 bp, Artificial Sequence
  Synthetic
atggccgtcaagcatctgattgtattgaaatttaaggacgagatcacgaacgcacaaaaggaagaatttttcaaaacttatgttactttattgaacaacatccctgctatgaagcaagtctactggggtaaggatgtgacacagaaaaacaaggaagaaggctacactcacattgtggaagttaccttcgagagcgttgaaactattcaatcctacatcatccaccccgctcatgtcggattcggtgatgtctatcgttccttttgggaaaaattgttgattttcgactataccccaagaaagtaa

SEQ ID NO: 418 - DNA, 306 bp, Artificial Sequence
  Synthetic
atggccgtcaagcatctgattgtattgaaatttaaggacgagatcacgaacgcacaaaaggaagaatttttcaaaacttatgttactttagttaacaacatccctgctatgaagcaagtctactggggtaaggatgtgacacagaaaaacaaggaagaaggctacactcacattgtggaagttaccttcgagagcgttgaaactattcaatcctacatcatccaccccgctcatgtcggattcggtgctgtctatcgttccttttgggaaaaattgttgattttcgactataccccaagaaagtaa

SEQ ID NO: 419 - DNA, 306 bp, Artificial Sequence
  Synthetic
atggccgtcaagcatctgattgtattgaaatttaaggacgagatcacgaacgcacaaaaggaagaatttttcaaaacttatgttactttattgaacataatccctgctatgaagcaagtctactggggtaaggatgtgacacagaaaaacaaggaagaaggctacactcacattgtggaagttaccttcgagagcgttgaaactattcaagactacatcatccaccccgctcatgtcggattcggtgctttctatcgttccttttgggaaaaattgttgattttcgactataccccaagaaagtaa

SEQ ID NO: 420 - DNA, 306 bp, Artificial Sequence
  Synthetic
atggccgtcaagcatctgattgtattgaaatttaaggacgagatcacgaacgatcaaaaggaagaatttttcaaaacttatgttaatttattgaacaacatccctgctatgaaggatgtctactggggtaaggatgtgacacagaaaaacaaggaagaaggctacactcacattgtggaagttaccttcgagagcgttgaaactattcaatcctacatcatccaccccgctcatgtcggattcggtgatttctatcgttccttttgggaaaaattgttgattttcgactataccccaagaaagtaa

SEQ ID NO: 421 - DNA, 306 bp, Artificial Sequence
  Synthetic
atggccgtcaagcatctgattgtattgaaatttaaggacgagatcacgaacgcacaaaaggaagaatttttcaaaacttatgttactttagttaacaacatccctgctatgaagcaagtctactggggtaaggatgtgacacagaaaaacaaggaagaaggctacactcacattgtggaagttaccttcgagagcgttgaaactattcaatcctacatcatccaccccgctcatgtcggattcggtgatttctatcgttccttttgggaaaaattgttgattttcgactataccccaagaaagtaa

SEQ ID NO: 422 - DNA, 306 bp, Artificial Sequence
  Synthetic
atggccgtcaagcatctgattgtattgaaatttaaggacgagatcacgaacgatcaaaaggaagaatttttcaaaacttatgttactttagttaacaacatccctgctatgaagcaagtctactggggtaaggatgtgacacagaaaaacaaggaagaaggctacactcacattgtggaagttaccttcgagagcgttgaaactattcaagactacatcatccaccccgctcatgtcggattcggtgctgtctatcgttccttttgggaaaaattgttgattttcgactataccccaagaaagtaa

SEQ ID NO: 423 - DNA, 306 bp, Artificial Sequence
  Synthetic
atggccgtcaagcatctgattgtattgaaatttaaggacgagatcacggaagatcaaaaggaagaatttttcaaaacttatgttactttattgaacaacatccctgctatgaaggatgtctactggggtaaggatgtgacacagaaaaacaaggaagaaggctacactcacattgtggaagttaccttcgagagcgttgaaactattcaatcctacatcatccaccccgctcatgtcggattcggtgctgtctatcgttccttttgggaaaaattgttgattttcgactataccccaagaaagtaa

SEQ ID NO: 424 - DNA, 306 bp, Artificial Sequence
  Synthetic
atggccgtcaagcatctgattgtattgaaatttaaggacgagatcacgaacgatcaaaaggaagaatttttcaaaacttatgttaatttattgaacataatccctgctatgaagcaagtctactggggtaaggatgtgacacagaaaaacaaggaagaaggctacactcacattgtggaagttaccttcgagagcgttgaaactattcaatcctacatcatccaccccgctcatgtcggattcggtgatttctatcgttccttttgggaaaaattgttgattttcgactataccccaagaaagtaa

SEQ ID NO: 425 - DNA, 306 bp, Artificial Sequence
  Synthetic
atggccgtcaagcatctgattgtattgaaatttaaggacgagatcacgaacgcacaaaaggaagaatttttcaaaacttatgttactttattgaacaacatccctgctatgaagcaagtctactggggtaaggatgtgacacagaaaaacaaggaagaaggctacactcacattgtggaagttaccttcgagagcgttgaaactattcaagactacatcatccaccccgctcatgtcggattcggtgctgtctatcgttccttttgggaaaaattgttgattttcgactataccccaagaaagtaa

SEQ ID NO: 426 - DNA, 306 bp, Artificial Sequence
  Synthetic
atggccgtcaagcatctgattgtattgaaatttaaggacgagatcacggaagatcaaaaggaagaatttttcaaaacttatgttaatttattgaacaacatccctgctatgaagcaagtctactggggtaaggatgtgacacagaaaaacaaggaagaaggctacactcacattgtggaagttaccttcgagagcgttgaaactattcaatcctacatcatccaccccgctcatgtcggattcggtgatttctatcgttccttttgggaaaaattgttgattttcgactataccccaagaaagtaa

SEQ ID NO: 427 - DNA, 306 bp, Artificial Sequence
  Synthetic
atggccgtcaagcatctgattgtattgaaatttaaggacgagatcacggaagatcaaaaggaagaatttttcaaaacttatgttactttagttaacaacatccctgctatgaagcaagtctactggggtaaggatgtgacacagaaaaacaaggaagaaggctacactcacattgtggaagttaccttcgagagcgttgaaactattcaatcctacatcatccaccccgctcatgtcggattcggtgctgtctatcgttccttttgggaaaaattgttgattttcgactataccccaagaaagtaa

SEQ ID NO: 428 - DNA, 306 bp, Artificial Sequence
  Synthetic
atggccgtcaagcatctgattgtattgaaatttaaggacgagatcacggaagcacaaaaggaagaatttttcaaaacttatgttactttattgaacaacatccctgctatgaagcaagtctactggggtaaggatgtgacacagaaaaacaaggaagaaggctacactcacattgtggaagttaccttcgagagcgttgaaactattcaatcctacatcatccaccccgctcatgtcggattcggtgctgtctatcgttccttttgggaaaaattgttgattttcgactataccccaagaaagtaa

SEQ ID NO: 429 - DNA, 306 bp, Artificial Sequence
  Synthetic
atggccgtcaagcatctgattgtattgaaatttaaggacgagatcacgaacgatcaaaaggaagaatttttcaaaacttatgttactttagttaacataatccctgctatgaagcaagtctactggggtaaggatgtgacacagaaaaacaaggaagaaggctacactcacattgtggaagttaccttcgagagcgttgaaactattcaatcctacatcatccaccccgctcatgtcggattcggtgatttctatcgttccttttgggaaaaattgttgattttcgactataccccaagaaagtaa

SEQ ID NO: 430 - DNA, 306 bp, Artificial Sequence
  Synthetic
atggccgtcaagcatctgattgtattgaaatttaaggacgagatcacgaacgatcaaaaggaagaatttttcaaaacttatgttactttagttaacataatccctgctatgaaggatgtctactggggtaaggatgtgacacagaaaaacaaggaagaaggctacactcacattgtggaagttaccttcgagagcgttgaaactattcaatcctacatcatccaccccgctcatgtcggattcggtgctttctatcgttccttttgggaaaaattgttgattttcgactataccccaagaaagtaa

SEQ ID NO: 431 - DNA, 306 bp, Artificial Sequence
  Synthetic
atggccgtcaagcatctgattgtattgaaatttaaggacgagatcacgaacgcacaaaaggaagaatttttcaaaacttatgttactttattgaacaacatccctgctatgaaggatgtctactggggtaaggatgtgacacagaaaaacaaggaagaaggctacactcacattgtggaagttaccttcgagagcgttgaaactattcaagactacatcatccaccccgctcatgtcggattcggtgctttctatcgttccttttgggaaaaattgttgattttcgactataccccaagaaagtaa

SEQ ID NO: 432 - DNA, 306 bp, Artificial Sequence
  Synthetic
atggccgtcaagcatctgattgtattgaaatttaaggacgagatcacgaacgatcaaaaggaagaatttttcaaaacttatgttactttagttaacaacatccctgctatgaaggatgtctactggggtaaggatgtgacacagaaaaacaaggaagaaggctacactcacattgtggaagttaccttcgagagcgttgaaactattcaatcctacatcatccaccccgctcatgtcggattcggtgctgtctatcgttccttttgggaaaaattgttgattttcgactataccccaagaaagtaa

SEQ ID NO: 433 - DNA, 306 bp, Artificial Sequence
  Synthetic
atggccgtcaagcatctgattgtattgaaatttaaggacgagatcacggaagatcaaaaggaagaatttttcaaaacttatgttactttattgaacataatccctgctatgaaggatgtctactggggtaaggatgtgacacagaaaaacaaggaagaaggctacactcacattgtggaagttaccttcgagagcgttgaaactattcaatcctacatcatccaccccgctcatgtcggattcggtgctttctatcgttccttttgggaaaaattgttgattttcgactataccccaagaaagtaa

SEQ ID NO: 434 - DNA, 306 bp, Artificial Sequence
  Synthetic
atggccgtcaagcatctgattgtattgaaatttaaggacgagatcacgaacgatcaaaaggaagaatttttcaaaacttatgttactttattgaacaacatccctgctatgaagcaagtctactggggtaaggatgtgacacagaaaaacaaggaagaaggctacactcacattgtggaagttaccttcgagagcgttgaaactattcaagactacatcatccaccccgctcatgtcggattcggtgatgtctatcgttccttttgggaaaaattgttgattttcgactataccccaagaaagtaa

SEQ ID NO: 435 - DNA, 306 bp, Artificial Sequence
  Synthetic
atggccgtcaagcatctgattgtattgaaatttaaggacgagatcacgaacgcacaaaaggaagaatttttcaaaacttatgttaatttattgaacataatccctgctatgaagcaagtctactggggtaaggatgtgacacagaaaaacaaggaagaaggctacactcacattgtggaagttaccttcgagagcgttgaaactattcaatcctacatcatccaccccgctcatgtcggattcggtgctttctatcgttccttttgggaaaaattgttgattttcgactataccccaagaaagtaa

SEQ ID NO: 436 - DNA, 306 bp, Artificial Sequence
  Synthetic
atggccgtcaagcatctgattgtattgaaatttaaggacgagatcacgaacgatcaaaaggaagaatttttcaaaacttatgttaatttagttaacaacatccctgctatgaaggatgtctactggggtaaggatgtgacacagaaaaacaaggaagaaggctacactcacattgtggaagttaccttcgagagcgttgaaactattcaatcctacatcatccaccccgctcatgtcggattcggtgctttctatcgttccttttgggaaaaattgttgattttcgactataccccaagaaagtaa

SEQ ID NO: 437 - DNA, 306 bp, Artificial Sequence
  Synthetic
atggccgtcaagcatctgattgtattgaaatttaaggacgagatcacggaagatcaaaaggaagaatttttcaaaacttatgttaatttattgaacaacatccctgctatgaaggatgtctactggggtaaggatgtgacacagaaaaacaaggaagaaggctacactcacattgtggaagttaccttcgagagcgttgaaactattcaatcctacatcatccaccccgctcatgtcggattcggtgctttctatcgttccttttgggaaaaattgttgattttcgactataccccaagaaagtaa

SEQ ID NO: 438 - DNA, 306 bp, Artificial Sequence
  Synthetic
atggccgtcaagcatctgattgtattgaaatttaaggacgagatcacgaacgcacaaaaggaagaatttttcaaaacttatgttactttagttaacaacatccctgctatgaagcaagtctactggggtaaggatgtgacacagaaaaacaaggaagaaggctacactcacattgtggaagttaccttcgagagcgttgaaactattcaagactacatcatccaccccgctcatgtcggattcggtgctttctatcgttccttttgggaaaaattgttgattttcgactataccccaagaaagtaa

SEQ ID NO: 439 - DNA, 306 bp, Artificial Sequence
  Synthetic
atggccgtcaagcatctgattgtattgaaatttaaggacgagatcacgaacgatcaaaaggaagaatttttcaaaacttatgttactttagttaacaacatccctgctatgaaggatgtctactggggtaaggatgtgacacagaaaaacaaggaagaaggctacactcacattgtggaagttaccttcgagagcgttgaaactattcaatcctacatcatccaccccgctcatgtcggattcggtgatttctatcgttccttttgggaaaaattgttgattttcgactataccccaagaaagtaa

SEQ ID NO: 440 - DNA, 306 bp, Artificial Sequence
  Synthetic
atggccgtcaagcatctgattgtattgaaatttaaggacgagatcacgaacgcacaaaaggaagaatttttcaaaacttatgttactttattgaacataatccctgctatgaaggatgtctactggggtaaggatgtgacacagaaaaacaaggaagaaggctacactcacattgtggaagttaccttcgagagcgttgaaactattcaatcctacatcatccaccccgctcatgtcggattcggtgctttctatcgttccttttgggaaaaattgttgattttcgactataccccaagaaagtaa

SEQ ID NO: 441 - DNA, 306 bp, Artificial Sequence
  Synthetic
atggccgtcaagcatctgattgtattgaaatttaaggacgagatcacgaacgcacaaaaggaagaatttttcaaaacttatgttactttagttaacaacatccctgctatgaaggatgtctactggggtaaggatgtgacacagaaaaacaaggaagaaggctacactcacattgtggaagttaccttcgagagcgttgaaactattcaatcctacatcatccaccccgctcatgtcggattcggtgctttctatcgttccttttgggaaaaattgttgattttcgactataccccaagaaagtaa

SEQ ID NO: 442 - DNA, 306 bp, Artificial Sequence
  Synthetic
atggccgtcaagcatctgattgtattgaaatttaaggacgagatcacggaagcacaaaaggaagaatttttcaaaacttatgttactttattgaacaacatccctgctatgaagcaagtctactggggtaaggatgtgacacagaaaaacaaggaagaaggctacactcacattgtggaagttaccttcgagagcgttgaaactattcaagactacatcatccaccccgctcatgtcggattcggtgctttctatcgttccttttgggaaaaattgttgattttcgactataccccaagaaagtaa

SEQ ID NO: 443 - DNA, 306 bp, Artificial Sequence
  Synthetic
atggccgtcaagcatctgattgtattgaaatttaaggacgagatcacggaagatcaaaaggaagaatttttcaaaacttatgttactttagttaacataatccctgctatgaagcaagtctactggggtaaggatgtgacacagaaaaacaaggaagaaggctacactcacattgtggaagttaccttcgagagcgttgaaactattcaatcctacatcatccaccccgctcatgtcggattcggtgctttctatcgttccttttgggaaaaattgttgattttcgactataccccaagaaagtaa

SEQ ID NO: 444 - DNA, 306 bp, Artificial Sequence
  Synthetic
atggccgtcaagcatctgattgtattgaaatttaaggacgagatcacgaacgatcaaaaggaagaatttttcaaaacttatgttaatttagttaacaacatccctgctatgaagcaagtctactggggtaaggatgtgacacagaaaaacaaggaagaaggctacactcacattgtggaagttaccttcgagagcgttgaaactattcaatcctacatcatccaccccgctcatgtcggattcggtgatttctatcgttccttttgggaaaaattgttgattttcgactataccccaagaaagtaa

SEQ ID NO: 445 - DNA, 306 bp, Artificial Sequence
  Synthetic
atggccgtcaagcatctgattgtattgaaatttaaggacgagatcacgaacgatcaaaaggaagaatttttcaaaacttatgttactttattgaacaacatccctgctatgaaggatgtctactggggtaaggatgtgacacagaaaaacaaggaagaaggctacactcacattgtggaagttaccttcgagagcgttgaaactattcaatcctacatcatccaccccgctcatgtcggattcggtgatgtctatcgttccttttgggaaaaattgttgattttcgactataccccaagaaagtaa

SEQ ID NO: 446 - DNA, 306 bp, Artificial Sequence
  Synthetic
atggccgtcaagcatctgattgtattgaaatttaaggacgagatcacgaacgatcaaaaggaagaatttttcaaaacttatgttactttagttaacaacatccctgctatgaaggatgtctactggggtaaggatgtgacacagaaaaacaaggaagaaggctacactcacattgtggaagttaccttcgagagcgttgaaactattcaagactacatcatccaccccgctcatgtcggattcggtgctttctatcgttccttttgggaaaaattgttgattttcgactataccccaagaaagtaa

SEQ ID NO: 447 - DNA, 306 bp, Artificial Sequence
  Synthetic
atggccgtcaagcatctgattgtattgaaatttaaggacgagatcacgaacgatcaaaaggaagaatttttcaaaacttatgttaatttattgaacataatccctgctatgaagcaagtctactggggtaaggatgtgacacagaaaaacaaggaagaaggctacactcacattgtggaagttaccttcgagagcgttgaaactattcaagactacatcatccaccccgctcatgtcggattcggtgctttctatcgttccttttgggaaaaattgttgattttcgactataccccaagaaagtaa

SEQ ID NO: 448 - DNA, 306 bp, Artificial Sequence
  Synthetic
atggccgtcaagcatctgattgtattgaaatttaaggacgagatcacgaacgatcaaaaggaagaatttttcaaaacttatgttaatttattgaacataatccctgctatgaaggatgtctactggggtaaggatgtgacacagaaaaacaaggaagaaggctacactcacattgtggaagttaccttcgagagcgttgaaactattcaatcctacatcatccaccccgctcatgtcggattcggtgctttctatcgttccttttgggaaaaattgttgattttcgactataccccaagaaagtaa

SEQ ID NO: 449 - DNA, 306 bp, Artificial Sequence
  Synthetic
atggccgtcaagcatctgattgtattgaaatttaaggacgagatcacgaacgatcaaaaggaagaatttttcaaaacttatgttactttattgaacataatccctgctatgaaggatgtctactggggtaaggatgtgacacagaaaaacaaggaagaaggctacactcacattgtggaagttaccttcgagagcgttgaaactattcaatcctacatcatccaccccgctcatgtcggattcggtgatttctatcgttccttttgggaaaaattgttgattttcgactataccccaagaaagtaa

SEQ ID NO: 450 - DNA, 306 bp, Artificial Sequence
  Synthetic
atggccgtcaagcatctgattgtattgaaatttaaggacgagatcacgaacgatcaaaaggaagaatttttcaaaacttatgttaatttattgaacaacatccctgctatgaagcaagtctactggggtaaggatgtgacacagaaaaacaaggaagaaggctacactcacattgtggaagttaccttcgagagcgttgaaactattcaagactacatcatccaccccgctcatgtcggattcggtgatttctatcgttccttttgggaaaaattgttgattttcgactataccccaagaaagtaa

SEQ ID NO: 451 - DNA, 306 bp, Artificial Sequence
  Synthetic
atggccgtcaagcatctgattgtattgaaatttaaggacgagatcacggaagatcaaaaggaagaatttttcaaaacttatgttaatttattgaacaacatccctgctatgaagcaagtctactggggtaaggatgtgacacagaaaaacaaggaagaaggctacactcacattgtggaagttaccttcgagagcgttgaaactattcaatcctacatcatccaccccgctcatgtcggattcggtgctgtctatcgttccttttgggaaaaattgttgattttcgactataccccaagaaagtaa

SEQ ID NO: 452 - DNA, 306 bp, Artificial Sequence
  Synthetic
atggccgtcaagcatctgattgtattgaaatttaaggacgagatcacggaagatcaaaaggaagaatttttcaaaacttatgttaatttagttaacaacatccctgctatgaagcaagtctactggggtaaggatgtgacacagaaaaacaaggaagaaggctacactcacattgtggaagttaccttcgagagcgttgaaactattcaatcctacatcatccaccccgctcatgtcggattcggtgctttctatcgttccttttgggaaaaattgttgattttcgactataccccaagaaagtaa

SEQ ID NO: 453 - DNA, 306 bp, Artificial Sequence
  Synthetic
atggccgtcaagcatctgattgtattgaaatttaaggacgagatcacgaacgatcaaaaggaagaatttttcaaaacttatgttaatttagttaacaacatccctgctatgaagcaagtctactggggtaaggatgtgacacagaaaaacaaggaagaaggctacactcacattgtggaagttaccttcgagagcgttgaaactattcaatcctacatcatccaccccgctcatgtcggattcggtgctgtctatcgttccttttgggaaaaattgttgattttcgactataccccaagaaagtaa

SEQ ID NO: 454 - DNA, 306 bp, Artificial Sequence
  Synthetic
atggccgtcaagcatctgattgtattgaaatttaaggacgagatcacgaacgatcaaaaggaagaatttttcaaaacttatgttaatttattgaacaacatccctgctatgaagcaagtctactggggtaaggatgtgacacagaaaaacaaggaagaaggctacactcacattgtggaagttaccttcgagagcgttgaaactattcaatcctacatcatccaccccgctcatgtcggattcggtgatgtctatcgttccttttgggaaaaattgttgattttcgactataccccaagaaagtaa

SEQ ID NO: 455 - DNA, 306 bp, Artificial Sequence
  Synthetic
atggccgtcaagcatctgattgtattgaaatttaaggacgagatcacgaacgatcaaaaggaagaatttttcaaaacttatgttaatttattgaacaacatccctgctatgaagcaagtctactggggtaaggatgtgacacagaaaaacaaggaagaaggctacactcacattgtggaagttaccttcgagagcgttgaaactattcaagactacatcatccaccccgctcatgtcggattcggtgctgtctatcgttccttttgggaaaaattgttgattttcgactataccccaagaaagtaa

SEQ ID NO: 456 - DNA, 306 bp, Artificial Sequence
  Synthetic
atggccgtcaagcatctgattgtattgaaatttaaggacgagatcacgaacgatcaaaaggaagaatttttcaaaacttatgttactttagttaacaacatccctgctatgaagcaagtctactggggtaaggatgtgacacagaaaaacaaggaagaaggctacactcacattgtggaagttaccttcgagagcgttgaaactattcaatcctacatcatccaccccgctcatgtcggattcggtgatgtctatcgttccttttgggaaaaattgttgattttcgactataccccaagaaagtaa

SEQ ID NO: 457 - DNA, 306 bp, Artificial Sequence
  Synthetic
atggccgtcaagcatctgattgtattgaaatttaaggacgagatcacggaagcacaaaaggaagaatttttcaaaacttatgttactttagttaacaacatccctgctatgaagcaagtctactggggtaaggatgtgacacagaaaaacaaggaagaaggctacactcacattgtggaagttaccttcgagagcgttgaaactattcaatcctacatcatccaccccgctcatgtcggattcggtgctttctatcgttccttttgggaaaaattgttgattttcgactataccccaagaaagtaa

SEQ ID NO: 458 - DNA, 306 bp, Artificial Sequence
  Synthetic
atgggatacaagcatctaatcgttttaaaatttaaggatgaaattacggaggctcaaaaagaagaatttttcaagacatacgtaaatcttgttaacataatcccagccatgaaggacgtgtattggggtaaagatttcactcagaagaacaaggaagaaggctacactcacattgttctggtcaccttcgaaagcgttaagcacatccaagactacattatccaccccgctcatgttgacttcggttcagtctattcgtcattcatggaaaaattgttgatttttgactacaagcctagtgagtaa

SEQ ID NO: 459 - DNA, 306 bp, Artificial Sequence
  Synthetic
atggcagtcaagcatctaatcgttttaaaatttaaggatgaaattacggaggctcaaaaagaagaatttttcaagacatacgtaaatcttgttaaccacatcccagccatgaaggacgtgtattggggtaaagatgtcactcagaagaacaagcacgaaggctacactcacattgttgaggtcaccttcgaaagcgttgaaaccatcgctgactacattatccaccccgctcatgttgccttcggtaaagtcgctagatcattctgggaaaaattgttgatttttgactacactcctcgtaagtaa

SEQ ID NO: 460 - DNA, 306 bp, Artificial Sequence
  Synthetic
atggcagtcaagcatctaatcgttttaaaatttaaggatgaaattacggaggctcaaaaagaagaatttttcaagagatacgtaaatcttgttaaccacatcccagccatgaaggacgtgtattggggtaaagatgtcactcagaagaacaagcacgaaggcttcactcacattgttgaggtcaccttcgaaagcgttgaaaccatcgctcaatacattatccaccccgctcatgttgctttcggtaatgtcgccagatcattctgggaaaaattgttgatttttgactacactcctcgtaagtaa

SEQ ID NO: 461 - DNA, 306 bp, Artificial Sequence
  Synthetic
atggcagtcaagcatctaatcgttttaaaatttaaggatgaaattacggaggctcaaaaagaagaatttttcaagacatacgtaaatcttgttaacataatcccagccatgaaggacgtgtattggggtaaagatgtcactcagaagaacaagcacgaaggcttcactcacattgttgaggtcaccttcgaaagcgttgaaaccatcgctgactacattatccaccccgctcatgttgccttcggtaaaaaggctagatcattctgggaaaaattgttgatttttgactacactcctcgtaagtaa

SEQ ID NO: 462 - DNA, 306 bp, Artificial Sequence
  Synthetic
atggcagtcaagcatctaatcgttttaaaatttaaggatgaaattacggaggaccaaaaagaagaatttatgaagcgttacgtaaatcttgttaaccacatcccagccatgaaggacgtgtattggggtaaagatgtcactcagaagaacaagcacgaaggcttcactcacattgttgaggtcaccttcgaaagcgttgaaaccatcgctgactacattatccaccccgctcatgttgctttcggtaacaaggctagatcattctgggaaaaattgttgatttttgactacactcctcgtaagtaa

SEQ ID NO: 463 - DNA, 306 bp, Artificial Sequence
  Synthetic
atggcagtcaagcatctaatcgttttaaaatttaaggatgaaattacggaggctcaaaaagaagaatttttcaagagatacgtaaatcttgttaaccgtatcccagccatgaaggacgtgtattggggtaaagatgtcactcagaagaacaagcacgaaggcttcactcacattgttgaggtcaccttcgaaagcgttgaaaccatcgctgactacattatccaccccgctcatgttgccttcggtgatgtcgctagatcattctgggaaaaattgttgatttttgactacactcctcgtaagtaa

SEQ ID NO: 464 - DNA, 306 bp, Artificial Sequence
  Synthetic
atggcagtcaagcatctaatcgttttaaaatttaaggatgaaattacggaggaccaaaaagaagaatttttcaagcgttacgtaaatcttgttaacagaatcccagccatgaaggacgtgtattggggtaaagatgtcactcagaagaacaagcacgaaggcttcactcacattgttgaggtcaccttcgaaagcgttgaaaccatcgctgactacattatccaccccgctcatgttgctttcggtaaggtctatagatcattctgggaaaaattgttgatttttgactacactcctcgtaagtaa

SEQ ID NO: 465 - DNA, 306 bp, Artificial Sequence
  Synthetic
atggcagtcaagcatctaatcgttttaaaatttaaggatgaaattacggaggctcaaaaagaagaatttttcaagagatacgtaaatcttgttaacataatcccagccatgaaggacgtgtattggggtaaagatgtcactcagaagaacaagcacgaaggcttcactcacattgttgaggtcaccttcgaaagcgttgaaaccatcgctgactacattatccaccccgctcatgttgccttcggtaaattttatagatcattctgggaaaaattgttgatttttgactacactcctcgtaagtaa

SEQ ID NO: 466 - DNA, 306 bp, Artificial Sequence
  Synthetic
atggcagtcaagcatctaatcgttttaaaatttaaggatgaaattacggaggctcaaaaagaagaatttttcaagcgttacgtaaatcttgttaacagaatcccagccatgaaggacgtgtattggggtaaagatgtcactcagaagaacaagcacgaaggcttcactcacattgttgaggtcaccttcgaaagcgttgaaaccatccaagactacattatccaccccgctcatgttgctttcggtgatgtcgccagatcattctgggaaaaattgttgatttttgactacactcctcgtaagtaa

SEQ ID NO: 467 - DNA, 306 bp, Artificial Sequence
  Synthetic
atggcagtcaagcatctaatcgttttaaaatttaaggatgaaattacggaggaccaaaaagaagaatttatgaagcgttacgtaagtcttgttaacaggatcccagccatgaaggacgtgtattggggtaaagatgtcactcagaagaacaagcacgaaggcttcactcacattgttgaggtcaccttcgaaagcgttgaaaccatcgctgactacattatccaccccgctcatgttgctttcggtaattttgccagatcattctgggaaaaattgttgatttttgactacactcctcgtaagtaa

SEQ ID NO: 468 - DNA, 306 bp, Artificial Sequence
  Synthetic
atggcagtcaagcatctaatcgttttaaaatttaaggatgaaattacggaggctcaaaaagaagaatttttcaagaggtacgtaaatcttgttaaccgtatcccagccatgaaggacgtgtattggggtaaagatgtcactcagaagaacaagcacgaaggcttcactcacattgttgaggtcaccttcgaaagcgttgaaaccatcgctgactacattatccaccccgctcatgttgccttcggtaacaaagcaagatcattctgggaaaaattgttgatttttgactacactcctcgtaagtaa

SEQ ID NO: 469 - DNA, 306 bp, Artificial Sequence
  Synthetic
atggcagtcaagcatctaatcgttttaaaatttaaggatgaaattacggaggctcaaaaagaagaatttatgaagacatacgtaaatcttgttaacataatcccagccatgaaggacgtgtattggggtaaagatgtcactcagaagaacaagcacgaaggctacactcacattgttgaggtcaccttcgaaagcgttgaaaccatcgctgactacattatccaccccgctcatgttgcattcggtaaagtcgctagatcattctgggaaaaattgttgatttttgactacactcctcgtaagtaa

SEQ ID NO: 470 - DNA, 306 bp, Artificial Sequence
  Synthetic
atggcagtcaagcatctaatcgttttaaaatttaaggatgaaattacggaggctcaaaaagaagaatttttcaagcgttacgtaaatcttgttaacagaatcccagccatgaaggacgtgtattggggtaaagatgtcactcagaagaacaagcacgaaggctacactcacattgttgaggtcaccttcgaaagcgttgaaaccatcgctgactacattatccaccccgctcatgttgccttcggtaaagtctatagatcattctgggaaaaattgttgatttttgactacactcctcgtaagtaa

SEQ ID NO: 471 - DNA, 306 bp, Artificial Sequence
  Synthetic
atggcagtcaagcatctaatcgttttaaaatttaaggatgaaattacggaggctcaaaaagaagaatttttcaagacatacgtaaatcttgttaaccacatcccagccatgaaggacgtgtattggggtaaagatgtcactcagaagaacaagcacgaaggcttcactcacattgttgaggtcaccttcgaaagcgttgaaaccatcgctgactacattatccaccccgctcatgttgctttcggtaaaaagtatagatcattctgggaaaaattgttgatttttgactacactcctcgtaagtaa

SEQ ID NO: 472 - DNA, 306 bp, Artificial Sequence
  Synthetic
atggcagtcaagcatctaatcgttttaaaatttaaggatgaaattacggaggaccaaaaagaagaatttttcaagcgttacgtatcacttgttaaccacatcccagccatgaaggacgtgtattggggtaaagatgtcactcagaagaacaagcacgaaggcttcactcacattgttgaggtcaccttcgaaagcgttgaaaccatcgctgactacattggacaccccgctcatgttgctttcggtaatgtcgccagatcattctgggaaaaattgttgatttttgactacactcctcgtaagtaa

SEQ ID NO: 473 - DNA, 306 bp, Artificial Sequence
  Synthetic
atggcagtcaagcatctaatcgttttaaaatttaaggatgaaattacggaggctcaaaaagaagaatttttcaagcgttacgtaaatcttgttaaccacatcccagccatgaaggacgtgtattggggtaaagatgtcactcagaagaacaagcacgaaggcttcactcacattgttgaggtcaccttcgaaagcgttgaaaccatcgctgactacattggtcaccccgctcatgttgccttcggtaacgtcgctagatcattctgggaaaaattgttgatttttgactacactcctcgtaagtaa

SEQ ID NO: 474 - DNA, 306 bp, Artificial Sequence
  Synthetic
atggcagtcaagcatctaatcgttttaaaatttaaggatgaaattacggaggaccaaaaagaagaatttttcaagcgttacgtaaatcttgttaacagaatcccagccatgaaggacgtgtattggggtaaagatgtcactcagaagaacaagcacgaaggcttcactcacattgttgaggtcaccttcgaaagcgttgaaaccatcgctgactacattatccaccccgctcatgttgctttcggtaatgtcgccagatcattctgggaaaaattgttgatttttgactacactcctcgtaagtaa

SEQ ID NO: 475 - DNA, 306 bp, Artificial Sequence
  Synthetic
atggcagtcaagcatctaatcgttttaaaatttaaggatgaaattacggaggaccaaaaagaagaatttttcaagagatacgtatcccttgttaaccgtatcccagccatgaaggacgtgtattggggtaaagatgtcactcagaagaacaagcacgaaggcttcactcacattgttgaggtcaccttcgaaagcgttgaaaccatcgctgactacattggtcaccccgctcatgttgctttcggtaatgtcgccagatcattctgggaaaaattgttgatttttgactacactcctcgtaagtaa

SEQ ID NO: 476 - DNA, 306 bp, Artificial Sequence
  Synthetic
atggcagtcaagcatctaatcgttttaaaatttaaggatgaaattacggaggctcaaaaagaagaatttttcaagagatacgtaaatcttgttaaccacatcccagccatgaaggacgtgtattggggtaaagatgtcactcagaagaacaagcacgaaggcttcactcacattgttgaggtcaccttcgaaagcgttgaaaccatcgctgactacattatccaccccgctcatgttggtttcggtaaagtctatagatcattctgggaaaaattgttgatttttgactacactcctcgtaagtaa

SEQ ID NO: 477 - DNA, 306 bp, Artificial Sequence
  Synthetic
atggcagtcaagcatctaatcgttttaaaatttaaggatgaaattacggaggaccaaaaagaagaatttttcaagagatacgtaaatcttgttaaccgtatcccagccatgaaggacgtgtattggggtaaagatgtcactcagaagaacaagcacgaaggcttcactcacattgttgaggtcaccttcgaaagcgttgaaaccatcgctgactacattatccaccccgctcatgttgccttcggtaataagtatagatcattctgggaaaaattgttgatttttgactacactcctcgtaagtaa

SEQ ID NO: 478 - DNA, 306 bp, Artificial Sequence
  Synthetic
atggcagtcaagcatctaatcgttttaaaatttaaggatgaaattacggaggaccaaaaagaagaatttttcaagaggtacgtatcgcttgttaacagaatcccagccatgaaggacgtgtattggggtaaagatgtcactcagaagaacaagcacgaaggcttcactcacattgttgaggtcaccttcgaaagcgttgaaaccatcgctgactacattggtcaccccgctcatgttgctttcggtaattttgctagatcattctgggaaaaattgttgatttttgactacactcctcgtaagtaa

SEQ ID NO: 479 - DNA, 306 bp, Artificial Sequence
  Synthetic
atggcagtcaagcatctaatcgttttaaaatttaaggatgaaattacggaggctcaaaaagaagaatttttcaagcgttacgtaaatcttgttaacataatcccagccatgaaggacgtgtattggggtaaagatgtcactcagaagaacaagcacgaaggcttcactcacattgttgaggtcaccttcgaaagcgttgaaaccatccaagactacattatccaccccgctcatgttgctttcggtaaggtcgccagatcattctgggaaaaattgttgatttttgactacactcctcgtaagtaa

SEQ ID NO: 480 - DNA, 306 bp, Artificial Sequence
  Synthetic
atggcagtcaagcatctaatcgttttaaaatttaaggatgaaattacggaggctcaaaaagaagaatttatgaagcgttacgtaaatcttgttaaccacatcccagccatgaaggacgtgtattggggtaaagatgtcactcagaagaacaagcatgaaggcttcactcacattgttgaggtcaccttcgaaagcgttgaaaccatcgctgactacattatccaccccgctcatgttgccttcggtaaagtcgctagatcattctgggaaaaattgttgatttttgactacactcctcgtaagtaa

SEQ ID NO: 481 - DNA, 306 bp, Artificial Sequence
  Synthetic
atggcagtcaagcatctaatcgttttaaaatttaaggatgaaattacggaggctcaaaaagaagaatttttcaagacatacgtaaatcttgttaaccacatcccagccatgaaggacgtgtattggggtaaagatgtcactcagaagaacaagcacgaaggcttcactcacattgttgaggtcaccttcgaaagcgttgaaaccatccaagactacattatccaccccgctcatgttgctttcggtaaagtcgccagatcattctgggaaaaattgttgatttttgactacactcctcgtaagtaa

SEQ ID NO: 482 - DNA, 306 bp, Artificial Sequence
  Synthetic
atggcagtcaagcatctaatcgttttaaaatttaaggatgaaattacggaggctcaaaaagaagaatttttcaagacatacgtaaatcttgttaacagaatcccagccatgaaggacgtgtattggggtaaagatgtcactcagaagaacaagcacgaaggcttcactcacattgttgaggtcaccttcgaaagcgttgaaaccatcgctgactacattatccaccccgctcatgttgctttcggtaagaaatatagatcattctgggaaaaattgttgatttttgactacactcctcgtaagtaa

SEQ ID NO: 483 - DNA, 306 bp, Artificial Sequence
  Synthetic
atggcagtcaagcatctaatcgttttaaaatttaaggatgaaattacggaggaccaaaaagaagaatttatgaagagatacgtaaatcttgttaaccgtatcccagccatgaaggacgtgtattggggtaaagatgtcactcagaagaacaagcacgaaggcttcactcacattgttgaggtcaccttcgaaagcgttgaaaccatcgctgactacattatccaccccgctcatgttgctttcggtgaagtcgccagatcattctgggaaaaattgttgatttttgactacactcctcgtaagtaa

SEQ ID NO: 484 - DNA, 306 bp, Artificial Sequence
  Synthetic
atggcagtcaagcatctaatcgttttaaaatttaaggatgaaattacggaggctcaaaaagaagaatttttcaagagatacgtaaatcttgttaaccgtatcccagccatgaaggacgtgtattggggtaaagatgtcactcagaagaacaagcacgaaggcttcactcacattgttgaggtcaccttcgaaagcgttgaaaccatcgctgactacattggtcaccccgctcatgttgccttcggtaataaagctagatcattctgggaaaaattgttgatttttgactacactcctcgtaagtaa

SEQ ID NO: 485 - DNA, 306 bp, Artificial Sequence
  Synthetic
atggcagtcaagcatctaatcgttttaaaatttaaggatgaaattacggaggctcaaaaagaagaatttttcaagcgttacgtaaatcttgttaacataatcccagccatgaaggacgtgtattggggtaaagatgtcactcagcaaaacaagcacgaaggcttcactcacattgttgaggtcaccttcgaaagcgttgaaaccatcgctgactacattatccaccccgctcatgttgccttcggtaatgtcgctagatcattctgggaaaaattgttgatttttgactacactcctcgtaagtaa

SEQ ID NO: 486 - DNA, 306 bp, Artificial Sequence
  Synthetic
atggcagtcaagcatctaatcgttttaaaatttaaggatgaaattacggaggctcaaaaagaagaatttttcaagagatacgtaaatcttgttaaccacatcccagccatgaaggacgtgtattggggtaaagatgtcactcagaagaacaagcacgaaggcttcactcacattgttgaggtcaccttcgaaagcgttgaaaccatccaagactacattatccaccccgctcatgttgccttcggtaatgtcgctagatcattctgggaaaaattgttgatttttgactacactcctcgtaagtaa

SEQ ID NO: 487 - DNA, 306 bp, Artificial Sequence
  Synthetic
atggcagtcaagcatctaatcgttttaaaatttaaggatgaaattacggaggctcaaaaagaagaatttttcaagacatacgtaaatcttgttaacagaatcccagccatgaaggacgtgtattggggtaaagatgtcactcagaagaacaagcacgaaggcttcactcacattgttgaggtcaccttcgaaagcgttgaaaccatcgctgactacattggtcaccccgctcatgttggtttcggtaaggtctatagatcattctgggaaaaattgttgatttttgactacactcctcgtaagtaa

SEQ ID NO: 488 - DNA, 306 bp, Artificial Sequence
  Synthetic
atggcagtcaagcatctaatcgttttaaaatttaaggatgaaattacggaggctcaaaaagaagaatttttcaagacatacgtaaatcttgttaacataatcccagccatgaaggacgtgtattggggtaaagatgtcactcagaagaacaagcacgaaggcttcactcacattgttgaggtcaccttcgaaagcgttgaaaccatccaagactacattggacaccccgctcatgttgctttcggtaaagtcgctagatcattctgggaaaaattgttgatttttgactacactcctcgtaagtaa

SEQ ID NO: 489 - DNA, 306 bp, Artificial Sequence
  Synthetic
atggcagtcaagcatctaatcgttttaaaatttaaggatgaaattacggaggctcaaaaagaagaatttttcaagcgttacgtaaatcttgttaaccacatcccagccatgaaggacgtgtattggggtaaagatgtcactcagaagaacaagcacgaaggcttcactcacattgttgaggtcaccttcgaaagcgttgaaaccatcgctgactacattatccaccccgctcatgttgccttcggtgatgtcgctagatcattctgggaaaaattgttgatttttgactacactcctcgtaagtaa

SEQ ID NO: 490 - DNA, 306 bp, Artificial Sequence
  Synthetic
atggcagtcaagcatctaatcgttttaaaatttaaggatgaaattacggaggctcaaaaagaagaatttttcaagagatacgtaaatcttgttaacataatcccagccatgaaggacgtgtattggggtaaagatgtcactcagaagaacaagcacgaaggcttcactcacattgttgaggtcaccttcgaaagcgttgaaaccatcgctgactacattatccaccccgctcatgttgccttcggtaataaggctagatcattctgggaaaaattgttgatttttgactacactcctcgtaagtaa

SEQ ID NO: 491 - DNA, 306 bp, Artificial Sequence
  Synthetic
atggcagtcaagcatctaatcgttttaaaatttaaggatgaaattacggaggctcaaaaagaagaatttttcaagacatacgtaaatcttgttaacataatcccagccatgaaggacgtgtattggggtaaagatgtcactcagaagaacaagcacgaaggcttcactcacattgttgaggtcaccttcgaaagcgttgaaaccatcgctgactacattatccaccccgctcatgttggtttcggtaagtttgccagatcattctgggaaaaattgttgatttttgactacactcctcgtaagtaa

SEQ ID NO: 492 - DNA, 306 bp, Artificial Sequence
  Synthetic
atggcagtcaagcatctaatcgttttaaaatttaaggatgaaattacggaggaccaaaaagaagaatttttcaagcgttacgtaaatcttgttaacataatcccagccatgaaggacgtgtattggggtaaagatgtcactcagaagaacaagcacgaaggcttcactcacattgttgaggtcaccttcgaaagcgttgaaaccatcgctgactacattggtcaccccgctcatgttgctttcggtaacgtcgccagatcattctgggaaaaattgttgatttttgactacactcctcgtaagtaa

SEQ ID NO: 493 - DNA, 306 bp, Artificial Sequence
  Synthetic
atggcagtcaagcatctaatcgttttaaaatttaaggatgaaattacggaggctcaaaaagaagaatttatgaagagatacgtaaatcttgttaacataatcccagccatgaaggacgtgtattggggtaaagatgtcactcagaagaacaagcacgaaggcttcactcacattgttgaggtcaccttcgaaagcgttgaaaccatccaagactacattatccaccccgctcatgttgctttcggtaaagtctatagatcattctgggaaaaattgttgatttttgactacactcctcgtaagtaa

SEQ ID NO: 494 - DNA, 306 bp, Artificial Sequence
  Synthetic
atggcagtcaagcatctaatcgttttaaaatttaaggatgaaattacggaggaccaaaaagaagaatttttcaagagatacgtaagtcttgttaacaggatcccagccatgaaggacgtgtattggggtaaagatgtcactcagaagaacaagcacgaaggcttcactcacattgttgaggtcaccttcgaaagcgttgaaaccatcgctcaatacattggacaccccgctcatgttgctttcggtaataaagccagatcattctgggaaaaattgttgatttttgactacactcctcgtaagtaa

SEQ ID NO: 495 - DNA, 306 bp, Artificial Sequence
  Synthetic
atggcagtcaagcatctaatcgttttaaaatttaaggatgaaattacggaggaccaaaaagaagaatttttcaagagatacgtaaatcttgttaacaggatcccagccatgaaggacgtgtattggggtaaagatgtcactcagaagaacaagcacgaaggcttcactcacattgttgaggtcaccttcgaaagcgttgaaaccatcgctgactacattggtcaccccgctcatgttgctttcggtaacgtctatagatcattctgggaaaaattgttgatttttgactacactcctcgtaagtaa

SEQ ID NO: 496 - DNA, 306 bp, Artificial Sequence
  Synthetic
atggcagtcaagcatctaatcgttttaaaatttaaggatgaaattacggaggaccaaaaagaagaatttttcaagagatacgtatcacttgttaaccacatcccagccatgaaggacgtgtattggggtaaagatgtcactcagaagaacaagcacgaaggcttcactcacattgttgaggtcaccttcgaaagcgttgaaaccatcgctgactacattatccaccccgctcatgttgctttcggtaattttgccagatcattctgggaaaaattgttgatttttgactacactcctcgtaagtaa

SEQ ID NO: 497 - DNA, 306 bp, Artificial Sequence
  Synthetic
atggcagtcaagcatctaatcgttttaaaatttaaggatgaaattacggaggaccaaaaagaagaatttttcaagagatacgtaaatcttgttaacataatcccagccatgaaggacgtgtattggggtaaagatgtcactcagaagaacaagcacgaaggcttcactcacattgttgaggtcaccttcgaaagcgttgaaaccatcgctgactacattatccaccccgctcatgttgctttcggtaaggtcgccagatcattctgggaaaaattgttgatttttgactacactcctcgtaagtaa

SEQ ID NO: 498 - DNA, 306 bp, Artificial Sequence
  Synthetic
atggcagtcaagcatctaatcgttttaaaatttaaggatgaaattacggaggctcaaaaagaagaatttttcaagcgttacgtaaatcttgttaaccacatcccagccatgaaggacgtgtattggggtaaagatgtcactcagaagaacaagcacgaaggcttcactcacattgttgaggtcaccttcgaaagcgttgaaaccatcgctgactacattatccaccccgctcatgttgccttcggtaactttgctagatcattctgggaaaaattgttgatttttgactacactcctcgtaagtaa

SEQ ID NO: 499 - DNA, 306 bp, Artificial Sequence
  Synthetic
atggcagtcaagcatctaatcgttttaaaatttaaggatgaaattacggaggaccaaaaagaagaatttttcaagagatacgtaaatcttgttaaccacatcccagccatgaaggacgtgtattggggtaaagatgtcactcagaagaacaagcacgaaggcttcactcacattgttgaggtcaccttcgaaagcgttgaaaccatcgctgactacattatccaccccgctcatgttgctttcggtaagtttgccagatcattctgggaaaaattgttgatttttgactacactcctcgtaagtaa

SEQ ID NO: 500 - DNA, 306 bp, Artificial Sequence
  Synthetic
atggcagtcaagcatctaatcgttttaaaatttaaggatgaaattacggaggaccaaaaagaagaatttttcaagaggtacgtaaatcttgttaaccacatcccagccatgaaggacgtgtattggggtaaagatgtcactcagaagaacaagcacgaaggcttcactcacattgttgaggtcaccttcgaaagcgttgaaaccatcgctgactacattatccaccccgctcatgttgctttcggtaaaaaggccagatcattctgggaaaaattgttgatttttgactacactcctcgtaagtaa

SEQ ID NO: 501 - DNA, 306 bp, Artificial Sequence
  Synthetic
atggcagtcaagcatctaatcgttttaaaatttaaggatgaaattacggaggaccaaaaagaagaatttatgaagcgttacgtaaatcttgttaaccacatcccagccatgaaggacgtgtattggggtaaagatgtcactcagaagaacaagcacgaaggcttcactcacattgttgaggtcaccttcgaaagcgttgaaaccatcgctgactacattatccaccccgctcatgttgctttcggtaatgtctatagatcattctgggaaaaattgttgatttttgactacactcctcgtaagtaa

SEQ ID NO: 502 - DNA, 306 bp, Artificial Sequence
  Synthetic
atggcagtcaagcatctaatcgttttaaaatttaaggatgaaattacggaggaccaaaaagaagaatttatgaagagatacgtaagtcttgttaaccacatcccagccatgaaggacgtgtattggggtaaagatgtcactcagaagaacaagcacgaaggcttcactcacattgttgaggtcaccttcgaaagcgttgaaaccatcgctgactacattatccaccccgctcatgttgctttcggtaataaggccagatcattctgggaaaaattgttgatttttgactacactcctcgtaagtaa

SEQ ID NO: 503 - DNA, 306 bp, Artificial Sequence
  Synthetic
atggcagtcaagcatctaatcgttttaaaatttaaggatgaaattacggaggaccaaaaagaaaagtttttcaaggcttacgtatcccttgttaacataatcccagccatgaaggacgtgtattggggtaaagatgtcactcagaagaacaaggaagaaggctacactcacattgttgaggtcaccttcgaaagcgttgaaaccatcttggactacattatccaccccgctcatgttggtttcaaagctgtctatagatcattctgggaaaaattgttgatttttgactacactcctcgtaagtaa

SEQ ID NO: 504 - DNA, 306 bp, Artificial Sequence
  Synthetic
atggcagtcaagcatctaatcgttttaaaatttaaggatgaaattacggaggctcaaaaagaagaatttttcaagacatacgtaaatcttgttaaccacatcccagccatgaaggacgtgtattggggtaaagatgtcactcagaagaacaagcacgaaggcttcactcacattgttgaggtcaccttcgaaagcgttgaaaccatcgctgactacattatccaccccgctcatgttgccttcggtaataaagctagatcattctgggaaaaattgttgatttttgactacactcctcgtaagtaa

SEQ ID NO: 505 - DNA, 306 bp, Artificial Sequence
  Synthetic
atggcagtcaagcatctaatcgttttaaaatttaaggatgaaattacggaggctcaaaaagaaaagtttttcaagacatacgtaaatcttgttaacataatcccagccatgaaggacgtgtattggggtaaagatgtcactcagcaaaacaaggaagaaggctacactcacattgttgagaccaccttcgaaagcgttgaaaccatcgctgactacattatccaccccgctcatgttggtttcggtcaattttatagatcattctgggaaaaattgttgatttttgactacactcctcgtaagtaa

SEQ ID NO: 506 - DNA, 306 bp, Artificial Sequence
  Synthetic
atggcagtcaagcatctaatcgttttaaaatttaaggatgaaattacggaggaccaaaaagaagaatttttcaagcgttacgtaagccttgttaacaggatcccagccatgaaggacgtgtattggggtaaagatgtcactcagcaaaacaagcacgaaggcttcactcacattgttgaggtcaccttcgaaagcgttgaaaccatcgctgactacattggtcaccccgctcatgttgctttcggtaataaggccagatcattctgggaaaaattgttgatttttgactacactcctcgtaagtaa

SEQ ID NO: 507 - DNA, 306 bp, Artificial Sequence
  Synthetic
atggcagtcaagcatctaatcgttttaaaatttaaggatgaaattacggaggaccaaaaagaagaatttatgaagagatacgtatcacttgttaaccacatcccagccatgaaggacgtgtattggggtaaagatgtcactcagaagaacaagcacgaaggcttcactcacattgttgaggtcaccttcgaaagcgttgaaaccatcgctgactacattatccaccccgctcatgttgctttcggtaattttgccagatcattctgggaaaaattgttgatttttgactacactcctcgtaagtaa

SEQ ID NO: 508 - DNA, 306 bp, Artificial Sequence
  Synthetic
atggcagtcaagcatctaatcgttttaaaatttaaggatgaaattacggaggaccaaaaagaagaatttttcaagagatacgtaagccttgttaaccgtatcccagccatgaaggacgtgtattggggtaaagatgtcactcagaagaacaagcacgaaggcttcactcacattgttgaggtcaccttcgaaagcgttgaaaccatcgctcaatacattggtcaccccgctcatgttgctttcaagaattttgccagatcattctgggaaaaattgttgatttttgactacactcctcgtaagtaa

SEQ ID NO: 509 - DNA, 306 bp, Artificial Sequence
  Synthetic
atggcagtcaagcatctaatcgttttaaaatttaaggatgaaattacggaggaccaaaaagaagaatttttcaagacatacgtaaatcttgttaaccacatcccagccatgaaggacgtgtattggggtaaagatgtcactcagcaaaacaagcacgaaggcttcactcacattgttgaggtcaccttcgaaagcgttgaaaccatcgctgactacattatccaccccgctcatgttgctttcggtaacgtcgccagatcattctgggaaaaattgttgatttttgactacactcctcgtaagtaa

SEQ ID NO: 510 - DNA, 306 bp, Artificial Sequence
  Synthetic
atggcagtcaagcatctaatcgttttaaaatttaaggatgaaattacggaggaccaaaaagaagaatttatgaagcgttacgtatcccttgttaaccacatcccagccatgaaggacgtgtattggggtaaagatgtcactcagaagaacaagcacgaaggcttcactcacattgttgaggtcaccttcgaaagcgttgaaaccatcgctgactacattggacaccccgctcatgttgctttcggtaataaggccagatcattctgggaaaaattgttgatttttgactacactcctcgtaagtaa

SEQ ID NO: 511 - DNA, 306 bp, Artificial Sequence
  Synthetic
atggcagtcaagcatctaatcgttttaaaatttaaggatgaaattacggaggaccaaaaagaagaatttttcaaggcttacgaaagtcttgttaacataatcccagccatgaaggacgtgtattggggtaaagatgtcactcagaagaacaaggaacacggctacactcacattgttgaggtcaccttcgaaagcgttgaaaccatcttggactacattatccaccccgctcatgttgctttcaaagccgtctatagaaagttctgggaaaaattgttgatttttgactacactcctcgtaagtaa

SEQ ID NO: 512 - DNA, 306 bp, Artificial Sequence
  Synthetic
atggcagtcaagcatctaatcgttttaaaatttaaggatgaaattacggaggaccaaaaagaagaatttttcaagagatacgtaaatcttgttaaccacatcccagccatgaaggacgtgtattggggtaaagatgtcactcagcaaaacaagcacgaaggcttcactcacattgttgaggtcaccttcgaaagcgttgaaaccatcgctcaatacattggacaccccgctcatgttgctttcggtaataaggccagatcattctgggaaaaattgttgatttttgactacactcctcgtaagtaa

SEQ ID NO: 513 - DNA, 306 bp, Artificial Sequence
  Synthetic
atggcagtcaagcatctaatcgttttaaaatttaaggatgaaattacggaggctcaaaaagaagaatttttcaagacatacgtatctcttgttaaccgtatcccagccatgaaggacgtgtattggggtaaagatgtcactcagaagaacaagcacgaaggcttcactcacattgttgaggtcaccttcgaaagcgttgaaaccatcgctgactacattatccaccccgctcatgttgctttcggtaaggtcgccagatcattctgggaaaaattgttgatttttgactacactcctcgtaagtaa

SEQ ID NO: 514 - DNA, 306 bp, Artificial Sequence
  Synthetic
atggcagtcaagcatctaatcgttttaaaatttaaggatgaaattacggaggaccaaaaagaagaatttatgaagacatacgtaaatcttgttaaccgtatcccagccatgaaggacgtgtattggggtaaagatgtcactcagaagaacaagcacgaaggcttcactcacattgttgaggtcaccttcgaaagcgttgaaaccatcgctgactacattggtcaccccgctcatgttgctttcggtaatgtcgccagatcattctgggaaaaattgttgatttttgactacactcctcgtaagtaa

SEQ ID NO: 515 - DNA, 306 bp, Artificial Sequence
  Synthetic
atggcagtcaagcatctaatcgttttaaaatttaaggatgaaattacggaggaccaaaaagaagaatttttcaaggcttacgtaagtcttgttaacataatcccagccatgaaggacgtgtattggggtaaagatgtcactcagaagaacaaggaacacggctacactcacattgttgaggtcaccttcgaaagcgttgaaaccatcttggactacattatccaccccgctcatgttggtttcaaagaagtctatagaaagttctgggaaaaattgttgatttttgactacactcctcgtaagtaa

SEQ ID NO: 516 - DNA, 306 bp, Artificial Sequence
  Synthetic
atggcagtcaagcatctaatcgttttaaaatttaaggatgaaattacggaggctcaaaaagaagaatttttcaagcgttacgtaaatcttgttaacagaatcccagccatgaaggacgtgtattggggtaaagatgtcactcagcaaaacaagcacgaaggcttcactcacattgttgaggtcaccttcgaaagcgttgaaaccatcgctgactacattggtcaccccgctcatgttgctttcggtaatgtcgccagatcattctgggaaaaattgttgatttttgactacactcctcgtaagtaa

SEQ ID NO: 517 - DNA, 306 bp, Artificial Sequence
  Synthetic
atggcagtcaagcatctaatcgttttaaaatttaaggatgaaattacggaggaccaaaaagaaaagtttttcaagacatacgtatcacttgttaaccgtatcccagccatgaaggacgtgtattggggtaaagatgtcactcagaagaacaaggaagaaggctacactcacattgttgaggtcaccttcgaaagcgttgaaaccatcttggactacattatccaccccgctcatgttggtttcaaaagagtctatagaaagtactgggaaaaattgttgatttttgactacactcctcgtaagtaa

SEQ ID NO: 518 - DNA, 306 bp, Artificial Sequence
  Synthetic
atggcagtcaagcatctaatcgttttaaaatttaaggatgaaattacggaggaccaaaaagaagaatttttcaaggcctacgaatctcttgttaacataatcccagccatgaaggacgtgtattggggtaaagatgtcactcagaagaacaaggaagaaggctacactcacattgttgaggtcaccttcgaaagcgttgaaaccatcttggactacattatccaccccgctcatgttggtttcaaacaagtctatagaaagttctgggaaaaattgttgatttttgactacactcctcgtaagtaa

SEQ ID NO: 519 - DNA, 306 bp, Artificial Sequence
  Synthetic
atggcagtcaagcatctaatcgttttaaaatttaaggatgaaattacggaggaccaaaaagaagaatttttcaaggcctacgtatcccttgttaacataatcccagccatgaaggacgtgtattggggtaaagatgtcactcagaagaacaaggaagaaggctacactcacattgttgaggtcaccttcgaaagcgttgaaaccatcttggactacattatccaccccgctcatgttggtttcaagcgtgtctatagaaaattctgggaaaaattgttgatttttgactacactcctcgtaagtaa

SEQ ID NO: 520 - DNA, 306 bp, Artificial Sequence
  Synthetic
atggcagtcaagcatctaatcgttttaaaatttaaggatgaaattacggaggctcaaaaagaaaagtttttcaagaggtacgtaaatcttgttaaccacatcccagccatgaaggacgtgtattggggtaaagatgtcactcagaagaaaaaggaagaaggctacactcacattgttgaggtcaccttcgaaagcgttgaaaccatccaacaatacattatccaccccgctcatgttgctttcggtgaagtctatagatcattctgggaaaaattgttgatttttgactactatcctcgtaagtaa

SEQ ID NO: 521 - DNA, 306 bp, Artificial Sequence
  Synthetic
atggcagtcaagcatctaatcgttttaaaatttaaggatgaaattacggaggaccaaaaagaagaatttttcaagaggtacgtaaatcttgttaacagaatcccagccatgaaggacgtgtattggggtaaagatgtcactcagaagaacaagcacgaaggcttcactcacattgttgaggtcaccttcgaaagcgttgaaaccatcgctcaatacattggtcaccccgctcatgttgctttcggtaataaggccagatcattctgggaaaaattgttgatttttgactacactcctcgtaagtaa

SEQ ID NO: 522 - DNA, 306 bp, Artificial Sequence
  Synthetic
atggcagtcaagcatctaatcgttttaaaatttaaggatgaaattacggaggaccaaaaagaagaatttatgaagagatacgtaaatcttgttaaccacatcccagccatgaaggacgtgtattggggtaaagatgtcactcagaagaacaagcacgaaggcttcactcacattgttgaggtcaccttcgaaagcgttgaaaccatcgctgactacattatccaccccgctcatgttgctttcggtaatgtcgccagatcattctgggaaaaattgttgatttttgactacactcctcgtaagtaa

SEQ ID NO: 523 - DNA, 306 bp, Artificial Sequence
  Synthetic
atggcagtcaagcatctaatcgttttaaaatttaaggatgaaattacggaggaccaaaaagaagaatttttcaaggcttacgaatcccttgttaacataatcccagccatgaaggacgtgtattggggtaaagatgtcactcagaagaacaaggaagaaggctacactcacattgttgaggtcaccttcgaaagcgttgaaaccatcgctgactacattatccaccccgctcatgttggtttcaaggccgtctatagaaagttctgggaaaaattgttgatttttgactacactcctcgtaagtaa

SEQ ID NO: 524 - DNA, 306 bp, Artificial Sequence
  Synthetic
atggcagtcaagcatctaatcgttttaaaatttaaggatgaaattacggaggaccaaaaagaagaatttttcaagcgttacgtatcccttgttaaccacatcccagccatgaaggacgtgtattggggtaaagatgtcactcagcaaaacaagcacgaaggcttcactcacattgttgaggtcaccttcgaaagcgttgaaaccatcgctgactacattatccaccccgctcatgttgctttcggtaattttgccagatcattctgggaaaaattgttgatttttgactacactcctcgtaagtaa

SEQ ID NO: 525 - DNA, 306 bp, Artificial Sequence
  Synthetic
atggcagtcaagcatctaatcgttttaaaatttaaggatgaaattacggaggacgacaaagaagaatttatgaagacatacgtatctcttgttaacataatcccagccatgaaggacgtgtattggggtaaagatgtcactcagaagaagaaggaagaaggcttcactcacattgttgaggtcaccttcgaaagcgttgaaaccatcgctgactacattggtcaccccgctcatgttgtattcggtgaaaagtatagatcattctgggaaaaattgttgatttttgactacactcctcgtaagtaa

SEQ ID NO: 526 - DNA, 306 bp, Artificial Sequence
  Synthetic
atggcagtcaagcatctaatcgttttaaaatttaaggatgaaattacggaggctcaaaaagaagaatttatgaagacatacgtaaatcttgttaacataatcccagccatgaaggacgtgtattggggtaaagatgtcactcagaagaacaagcacgaaggcttcactcacattgttgaggtcaccttcgaaagcgttgaaaccatcgctgactacattatccaccccgctcatgttgccttcggtaaggtcgctagatcattctgggaaaaattgttgatttttgactacactcctcgtaagtaa

SEQ ID NO: 527 - DNA, 306 bp, Artificial Sequence
  Synthetic
atggcagtcaagcatctaatcgttttaaaatttaaggatgaaattacggaggaccaaaaagaaaagtttttcaagacatacgtatctcttgttaacataatcccagccatgaaggacgtgtattggggtaaagatgtcactcagaagaacaaggaagaaggctacactcacattgttgaggtcaccttcgaaagcgttgaaaccatcgctgactacattatccaccccgctcatgttggtttcaaaagggtctatagaaagtactgggaaaaattgttgatttttgactacactcctcgtaagtaa

SEQ ID NO: 528 - DNA, 306 bp, Artificial Sequence
  Synthetic
atggcagtcaagcatctaatcgttttaaaatttaaggatgaaattacggaggaccaaaaagaagaatttttcaaggcctacgaaagccttgttaacataatcccagccatgaaggacgtgtattggggtaaagatgtcactcagaagaacaaggaacacggctacactcacattgttgaggtcaccttcgaaagcgttgaaaccatcctggactacattatccaccccgctcatgttggtttcaaggaagtctatagaaagttctgggaaaaattgttgatttttgactacactcctcgtaagtaa

SEQ ID NO: 529 - DNA, 306 bp, Artificial Sequence
  Synthetic
atggcagtcaagcatctaatcgttttaaaatttaaggatgaaattacggaggaccaaaaagaagaatttatgaagcgttacgtatctcttgttaacagaatcccagccatgaaggacgtgtattggggtaaagatgtcactcagaagaacaagcacgaaggcttcactcacattgttgaggtcaccttcgaaagcgttgaaaccatcgctcaatacattggtcaccccgctcatgttgctttcggtaataaggccagatcattctgggaaaaattgttgatttttgactacactcctcgtaagtaa

SEQ ID NO: 530 - DNA, 306 bp, Artificial Sequence
  Synthetic
atggcagtcaagcatctaatcgttttaaaatttaaggatgaaattacggaggaccaaaaagaagaatttttcaagaggtacgtaagccttgttaacagaatcccagccatgaaggacgtgtattggggtaaagatgtcactcagaagaacaagcacgaaggcttcactcacattgttgaggtcaccttcgaaagcgttgaaaccatcgctgactacattggtcaccccgctcatgttgctttcggtaataaggccagatcattctgggaaaaattgttgatttttgactacactcctcgtaagtaa

SEQ ID NO: 531 - DNA, 306 bp, Artificial Sequence
  Synthetic
atggcagtcaagcatctaatcgttttaaaatttaagaaagaaattacggaggatcaaaaaaagaagtttttcgccacatacgtatcacttgttaacataatcccagccatgttggacgtgtattggggtaaagatgtcactcagaagaacaaggaagaaggcttcactcacattgttgagaccaccttcgaaagcgttgaaaccatcctgcaatacattggtcaccccgctcatgttgctttcaaggctaagtatagatcattctgggaaaaattgttgatttttgactacactcctcgtaagtaa

SEQ ID NO: 532 - DNA, 306 bp, Artificial Sequence
  Synthetic
atggcagtcaagcatctaatcgttttaaaatttaaggatgaaattacggaggaccaaaaagaagaatttttcaagcgttacgtaaatcttgttaacaggatcccagccatgaaggacgtgtattggggtaaagatgtcactcagaagaacaagcacgaaggcttcactcacattgttgaggtcaccttcgaaagcgttgaaaccatcgctgactacattggacaccccgctcatgttgctttcggtaactttgccagatcattctgggaaaaattgttgatttttgactacactcctcgtaagtaa

SEQ ID NO: 533 - DNA, 306 bp, Artificial Sequence
  Synthetic
atggcagtcaagcatctaatcgttttaaaatttaaggatgaaattacggaggctcaaaaagaagaatttttcaagcgttacgtaaatcttgttaacaggatcccagccatgaaggacgtgtattggggtaaagatgtcactcagaagaacaagcacgaaggcttcactcacattgttgaggtcaccttcgaaagcgttgaaaccatcgctgactacattatccaccccgctcatgttgccttcggtaaggtcgctagatcattctgggaaaaattgttgatttttgactacactcctcgtaagtaa

SEQ ID NO: 534 - DNA, 306 bp, Artificial Sequence
  Synthetic
atggcagtcaagcatctaatcgttttaaaatttaaggatgaaattacggaggctcaaaaagaagaatttttcaagaggtacgtaaatcttgttaaccacatcccagccatgaaggacgtgtattggggtaaagatgtcactcagaagaacaagcacgaaggcttcactcacattgttgaggtcaccttcgaaagcgttgaaaccatcgctgactacattatccaccccgctcatgttgccttcggtgaagtcgctagatcattctgggaaaaattgttgatttttgactacactcctcgtaagtaa

SEQ ID NO: 535 - DNA, 306 bp, Artificial Sequence
  Synthetic
atggcagtcaagcatctaatcgttttaaaatttaaggatgaaattacggaggctcaaaaagaagaatttttcaagacatacgtaaatcttgttaacataatcccagccatgaaggacgtgtattggggtaaagatgtcactcagcaaaacaagcacgaaggcttcactcacattgttgaggtcaccttcgaaagcgttgaaaccatccaagactacattatccaccccgctcatgttgctttcggtaaggtcgccagatcattctgggaaaaattgttgatttttgactacactcctcgtaagtaa

SEQ ID NO: 536 - DNA, 306 bp, Artificial Sequence
  Synthetic
atggcagtcaagcatctaatcgttttaaaatttaaggatgaaattacggaggctcaaaaagaagaatttttcaagcgttacgtaaatcttgttaacagaatcccagccatgaaggacgtgtattggggtaaagatgtcactcagaagaacaaggaagaaggcttcactcacattgttgaggtcaccttcgaaagcgttgaaaccatcgctgactacattatccaccccgctcatgttgccttcggtaaagtcgctagatcattctgggaaaaattgttgatttttgactacactcctcgtaagtaa

SEQ ID NO: 537 - DNA, 306 bp, Artificial Sequence
  Synthetic
atggcagtcaagcatctaatcgttttaaaatttaagagagaaattacggaggaccaaaaagaagaatttttcaagacatacgtatcacttgttaacataatcccagccatgaaggacgtgtattggggtaaagatgtcactcagaagaacaaggaagaaggctacactcacattgttgaggtcaccttcgaaagcgttgaaaccatcttgcaatacattatccaccccgctcatgttgctttcggtaaggtctatagatcattctgggaaaaattgttgatttttgactacactcctcgtaagtaa

SEQ ID NO: 538 - DNA, 306 bp, Artificial Sequence
  Synthetic
atggcagtcaagcatctaatcgttttaaaatttaaggatgaaattacggaggctcaaaaagaaaagtttttcaagcactacgtatcacttgttaacataatcccagccatgaagggcgtgtattggggtaaagatgtcactcagcaaaacaagcacgaaggctacactcacattgttgaggtcaccttcgaaagcgttgaaaccatccaagactacattatccaccccgctcatgttggtttcggtaataagtatagatcattctgggaaaaattgttgatttttgactacactcctcgtaagtaa

SEQ ID NO: 539 - DNA, 306 bp, Artificial Sequence
  Synthetic
atggcagtcaagcatctaatcgttttaaaatttaaggatgaaattacggaggaccaaaaagaaaagtttttcaagacatacgtatctcttgttaacataatcccagccatgaaggacgtgtattggggtaaagatgtcactcagaagaacaaggaagaaggctacactcacattgttgaggtcaccttcgaaagcgttgaaaccatcttggactacattatccaccccgctcatgttggtttcaaaaaggtctatagaaagttctgggaaaaattgttgatttttgactacactcctcgtaagtaa

SEQ ID NO: 540 - DNA, 306 bp, Artificial Sequence
  Synthetic
atggcagtcaagcatctaatcgttttaaaatttaaggatgaaattacggaggaccaaaaagaagaatttttcaaggcctacgtatcgcttgttaacataatcccagccatgaaggacgtgtattggggtaaagatgtcactcagaagaacaaggaagaaggctacactcacattgttgaggtcaccttcgaaagcgttgaaaccatcctggactacattatccaccccgctcatgttggtttcaaggctgtctatagaaaattctgggaaaaattgttgatttttgactacactcctcgtaagtaa

SEQ ID NO: 541 - DNA, 306 bp, Artificial Sequence
  Synthetic
atggcagtcaagcatctaatcgttttaaaatttaaggatgaaattacggaggaccaaaaagaaaagtttttcaagacatacgtaagccttgttaacataatcccagccatgaaggacgtgtattggggtaaagatgtcactcagaagaacaaggaagaaggctacactcacattgttgaggtcaccttcgaaagcgttgaaaccatcttggactacattatccaccccgctcatgttggtttcaagcaagtctatagaaaatactgggaaaaattgttgatttttgactacactcctcgtaagtaa

SEQ ID NO: 542 - DNA, 306 bp, Artificial Sequence
  Synthetic
atggcagtcaagcatctaatcgttttaaaatttaaggatgaaattacggaggctcaaaaagaagaatttttcaagcgttacgtaaatcttgttaaccacatcccagccatgaaggacgtgtattggggtaaagatgtcactcagaagaacaaggaagaaggcttcactcacattgttgaggtcaccttcgaaagcgttgaaaccatcgctgactacattatccaccccgctcatgttgccttcggtaaggtcgctagatcattctgggaaaaattgttgatttttgactacactcctcgtaagtaa

SEQ ID NO: 543 - DNA, 306 bp, Artificial Sequence
  Synthetic
atggcagtcaagcatctaatcgttttaaaatttaaggatgaaattacggaggaccaaaaagaagaatttttcaagagatacgtaaatcttgttaacaggatcccagccatgaaggacgtgtattggggtaaagatgtcactcagaagaacaagcacgaaggcttcactcacattgttgaggtcaccttcgaaagcgttgaaaccatcgctgactacattatccaccccgctcatgttgctttcggtaagaaggccagatcattctgggaaaaattgttgatttttgactacactcctcgtaagtaa

SEQ ID NO: 544 - DNA, 306 bp, Artificial Sequence
  Synthetic
atggcagtcaagcatctaatcgttttaaaatttaaggatgaaattacggaggaccaaaaagaagaatttttcaagcgttacgtaaatcttgttaaccacatcccagccatgaaggacgtgtattggggtaaagatgtcactcagaagaacaagcacgaaggcttcactcacattgttgaggtcaccttcgaaagcgttgaaaccatcgctgactacattatccaccccgctcatgttgctttcggtaaggtctatagatcattctgggaaaaattgttgatttttgactacactcctcgtaagtaa

SEQ ID NO: 545 - DNA, 306 bp, Artificial Sequence
  Synthetic
atggcagtcaagcatctaatcgttttaaaatttaaggatgaaattacggaggctcaaaaagaagaatttttcaagacatacgtaaatcttgttaacagaatcccagccatgaaggacgtgtattggggtaaagatgtcactcagaagaacaagcacgaaggcttcactcacattgttgaggtcaccttcgaaagcgttgaaaccatcgctgactacattatccaccccgctcatgttgccttcggtaattttgcaagatcattctgggaaaaattgttgatttttgactacactcctcgtaagtaa

SEQ ID NO: 546 - DNA, 306 bp, Artificial Sequence
  Synthetic
atggcagtcaagcatctaatcgttttaaaatttaaggatgaaattacggaggaccaaaaagaagaatttttcaagcgttacgtaaatcttgttaacagaatcccagccatgaaggacgtgtattggggtaaagatgtcactcagaagaacaagcacgaaggcttcactcacattgttgaggtcaccttcgaaagcgttgaaaccatcgctgactacattatccaccccgctcatgttgctttcggtaagtttgccagatcattctgggaaaaattgttgatttttgactacactcctcgtaagtaa

SEQ ID NO: 547 - DNA, 306 bp, Artificial Sequence
  Synthetic
atggcagtcaagcatctaatcgttttaaaatttaaggatgaaattacggaggctcaaaaagaagaatttttcaagcgttacgtaaatcttgttaacagaatcccagccatgaaggacgtgtattggggtaaagatgtcactcagaagaacaagcacgaaggctacactcacattgttgaggtcaccttcgaaagcgttgaaaccatccaagactacattatccaccccgctcatgttgctttcggtaatgtcgccagatcattctgggaaaaattgttgatttttgactacactcctcgtaagtaa

SEQ ID NO: 548 - DNA, 306 bp, Artificial Sequence
  Synthetic
atggcagtcaagcatctaatcgttttaaaatttaaggatgaaattacggaggctcaaaaagaagaatttttcaagacatacgtaaatcttgttaaccacatcccagccatgaaggacgtgtattggggtaaagatgtcactcagaagaacaagcacgaaggcttcactcacattgttgaggtcaccttcgaaagcgttgaaaccatcgctgactacattatccaccccgctcatgttgccttcggtaaggtcgctagatcattctgggaaaaattgttgatttttgactacactcctcgtaagtaa

SEQ ID NO: 549 - DNA, 306 bp, Artificial Sequence
  Synthetic
atggcagtcaagcatctaatcgttttaaaatttaaggatgaaattacggaggctcaaaaagaagaatttatgaagacatacgtaaatcttgttaacagaatcccagccatgaaggacgtgtattggggtaaagatgtcactcagaagaacaagcacgaaggcttcactcacattgttgaggtcaccttcgaaagcgttgaaaccatcgctgactacattatccaccccgctcatgttgccttcggtaaagtcgctagatcattctgggaaaaattgttgatttttgactacactcctcgtaagtaa

SEQ ID NO: 550 - DNA, 306 bp, Artificial Sequence
  Synthetic
atggcagtcaagcatctaatcgttttaaaatttaaggatgaaattacggaggaccaaaaagaagaatttttcaaggcttacgaatcgcttgttaacataatcccagccatgaaggacgtgtattggggtaaagatgtcactcagaagaacaaggaagaaggctacactcacattgttgaggtcaccttcgaaagcgttgaaaccatcttggactacattatccaccccgctcatgttggtttcaagaatgtctatagaaaattctgggaaaaattgttgatttttgactacactcctcgtaagtaa

SEQ ID NO: 551 - DNA, 306 bp, Artificial Sequence
  Synthetic
atggcagtcaagcatctaatcgttttaaaatttaaggatgaaattacggaggaccaaaaagaagaatttttcaaggcctacgtatctcttgttaacataatcccagccatgaaggacgtgtattggggtaaagatgtcactcagaagaacaaggaagaaggctacactcacattgttgaggtcaccttcgaaagcgttgaaaccatcctggactacattatccaccccgctcatgttggtttcaaggaagtctatagaaaattctgggaaaaattgttgatttttgactacactcctcgtaagtaa

SEQ ID NO: 552 - DNA, 306 bp, Artificial Sequence
  Synthetic
atggcagtcaagcatctaatcgttttaaaatttaaggatgaaattacggaggaccaaaaagaaaagtttttcaagacatacgtatcgcttgttaacataatcccagccatgaaggacgtgtattggggtaaagatgtcactcagaagaacaaggaagaaggctacactcacattgttgaggtcaccttcgaaagcgttgaaaccatcttggactacattatccaccccgctcatgttggtttcaaaggtgtctatagaaagttctgggaaaaattgttgatttttgactacactcctcgtaagtaa

SEQ ID NO: 553 - DNA, 306 bp, Artificial Sequence
  Synthetic
atggcagtcaagcatctaatcgttttaaaatttaaggatgaaattacggaggaccaaaaagaaaagtttttcaaggcctacgtatctcttgttaacataatcccagccatgaaggacgtgtattggggtaaagatgtcactcagaagaacaaggaacacggctacactcacattgttgaggtcaccttcgaaagcgttgaaaccatcctggactacattatccaccccgctcatgttggtttcaaagctgtctatagatcattctgggaaaaattgttgatttttgactacactcctcgtaagtaa

SEQ ID NO: 554 - DNA, 306 bp, Artificial Sequence
  Synthetic
atggcagtcaagcatctaatcgttttaaaatttaaggatgaaattacggaggaccaaaaagaagaatttttcaagaggtacgtaaatcttgttaaccacatcccagccatgaaggacgtgtattggggtaaagatgtcactcagaagaacaagcacgaaggcttcactcacattgttgaggtcaccttcgaaagcgttgaaaccatcgctgactacattatccaccccgctcatgttgctttcggtgaagtcgccagatcattctgggaaaaattgttgatttttgactacactcctcgtaagtaa

SEQ ID NO: 555 - DNA, 306 bp, Artificial Sequence
  Synthetic
atggcagtcaagcatctaatcgttttaaaatttaaggatgaaattacggaggctcaaaaagaagaatttttcaagagataccacaatcttgttaacataatcccagccatgaaggacgtgtattggggtaaagatgtcactcagaagaacaagcacgaaggcttcactcacattgttgaggtcaccttcgaaagcgttgaaaccatcgctgactacattatccaccccgctcatgttgctttcggtaaagtctatagatcattctgggaaaaattgttgatttttgactacactcctcgtaagtaa

SEQ ID NO: 556 - DNA, 306 bp, Artificial Sequence
  Synthetic
atggcagtcaagcatctaatcgttttaaaatttaaggatgaaattacggaggctcaaaaagaagaatttttcaagacataccacaatcttgttaaccacatcccagccatgaaggacgtgtattggggtaaagatgtcactcagaagaacaagcatgaaggcttcactcacattgttgaggtcaccttcgaaagcgttgaaaccatcgctgactacattatccaccccgctcatgttgccttcggtaaggtctatagatcattctgggaaaaattgttgatttttgactacactcctcgtaagtaa

SEQ ID NO: 557 - DNA, 306 bp, Artificial Sequence
  Synthetic
atggcagtcaagcatctaatcgttttaaaatttaaggatgaaattacggaggctcaaaaagaagaatttttcaagacatacgtaaatcttgttaaccacatcccagccatgaaggacgtgtattggggtaaagatgtcactcagaagaacaagcacgaaggcttcactcacattgttgaggtcaccttcgaaagcgttgaaaccatcgctgactacattatccaccccgctcatgttgtgttcggtaaagtctatagatcattctgggaaaaattgttgatttttgactacactcctcgtaagtaa

SEQ ID NO: 558 - DNA, 306 bp, Artificial Sequence
  Synthetic
atggcagtcaagcatctaatcgttttaaaatttaaggatgaaattacggaggaccaaaaagaagaatttttcaagagatacgtaaatcttgttaacataatcccagccatgaaggacgtgtattggggtaaagatgtcactcagaagaacaagcacgaaggcttcactcacattgttgaggtcaccttcgaaagcgttgaaaccatcgctgactacattatccaccccgctcatgttgctttcggtaacaaggccagatcattctgggaaaaattgttgatttttgactacactcctcgtaagtaa

SEQ ID NO: 559 - DNA, 306 bp, Artificial Sequence
  Synthetic
atggcagtcaagcatctaatcgttttaaaatttaaggatgaaattacggaggaccaaaaagaaaagtttttcaagacatacgtatctcttgttaaccgtatcccagccatgaaggacgtgtattggggtaaagatgtcactcagaagaacaaggaagaaggctacactcacattgttgaggtcaccttcgaaagcgttgaaaccatcttggactacattatccaccccgctcatgttggtttcaaaagggtctatagaaagttctgggaaaaattgttgatttttgactacactcctcgtaagtaa

SEQ ID NO: 560 - DNA, 306 bp, Artificial Sequence
  Synthetic
atggcagtcaagcatctaatcgttttaaaatttaaggatgaaattacggaggaccaaaaagaagaatttttcaagcgttacgtaaatcttgttaaccacatcccagccatgaaggacgtgtattggggtaaagatgtcactcagaagaacaagcacgaaggcttcactcacattgttgaggtcaccttcgaaagcgttgaaaccatcgctcaatacattggtcaccccgctcatgttgccttcggtaacaaggctagatcattctgggaaaaattgttgatttttgactacactcctcgtaagtaa

SEQ ID NO: 561 - DNA, 306 bp, Artificial Sequence
  Synthetic
atggcagtcaagcatctaatcgttttaaaatttaaggatgaaattacggaggctcaaaaagaagaatttatgaagagatacgtaaatcttgttaacaggatcccagccatgaaggacgtgtattggggtaaagatgtcactcagaagaacaagcacgaaggcttcactcacattgttgaggtcaccttcgaaagcgttgaaaccatcgctgactacattatccaccccgctcatgttgccttcggtaacgtctatagatcattctgggaaaaattgttgatttttgactacactcctcgtaagtaa

SEQ ID NO: 562 - DNA, 306 bp, Artificial Sequence
  Synthetic
atggcagtcaagcatctaatcgttttaaaatttaaggatgaaattacggaggctcaaaaagaagaatttatgaagacatacgtaaatcttgttaaccacatcccagccatgaaggacgtgtattggggtaaagatgtcactcagaagaacaagcacgaaggcttcactcacattgttgaggtcaccttcgaaagcgttgaaaccatcgctgactacattatccaccccgctcatgttgccttcggtaaggtctatagatcattctgggaaaaattgttgatttttgactacactcctcgtaagtaa

SEQ ID NO: 563 - DNA, 306 bp, Artificial Sequence
  Synthetic
atggcagtcaagcatctaatcgttttaaaatttaaggatgaaattacggaggctcaaaaagaagaatttatgaagcgttacgtaaatcttgttaaccacatcccagccatgaaggacgtgtattggggtaaagatgtcactcagaagaacaagcacgaaggcttcactcacattgttgaggtcaccttcgaaagcgttgaaaccatcgctgactacattatccaccccgctcatgttgccttcggtaatgtcgctagatcattctgggaaaaattgttgatttttgactacactcctcgtaagtaa

SEQ ID NO: 564 - DNA, 306 bp, Artificial Sequence
  Synthetic
atggcagtcaagcatctaatcgttttaaaatttaaggatgaaattacggaggctcaaaaagaagaatttttcaagacatacgtaaatcttgttaaccacatcccagccatgaaggacgtgtattggggtaaagatgtcactcagaagaacaagcacgaaggcttcactcacattgttgaggtcaccttcgaaagcgttgaaaccatcgctgactacattggtcaccccgctcatgttgctttcggtaaagtctatagatcattctgggaaaaattgttgatttttgactacactcctcgtaagtaa

SEQ ID NO: 565 - DNA, 306 bp, Artificial Sequence
  Synthetic
atggcagtcaagcatctaatcgttttaaaatttaaggatgaaattacggaggaccaaaaagaagaatttatgaagaggtacgtaaatcttgttaacagaatcccagccatgaaggacgtgtattggggtaaagatgtcactcagaagaacaagcacgaaggcttcactcacattgttgaggtcaccttcgaaagcgttgaaaccatcgctcaatacattggtcaccccgctcatgttgctttcggtaattttgctagatcattctgggaaaaattgttgatttttgactacactcctcgtaagtaa

SEQ ID NO: 566 - DNA, 306 bp, Artificial Sequence
  Synthetic
atggcagtcaagcatctaatcgttttaaaatttaaggatgaaattacggaggctcaaaaagaagaatttttcaagcgttacgtaaatcttgttaacagaatcccagccatgaaggacgtgtattggggtaaagatgtcactcagaagaacaagcacgaaggcttcactcacattgttgaggtcaccttcgaaagcgttgaaaccatcgctgactacattatccaccccgctcatgttgccttcggtaaggtctatagatcattctgggaaaaattgttgatttttgactacactcctcgtaagtaa

SEQ ID NO: 567 - DNA, 306 bp, Artificial Sequence
  Synthetic
atggcagtcaagcatctaatcgttttaaaatttaaggatgaaattacggaggaccaaaaagaagaatttatgaagagatacgtaaatcttgttaaccacatcccagccatgaaggacgtgtattggggtaaagatgtcactcagaagaacaagcacgaaggcttcactcacattgttgaggtcaccttcgaaagcgttgaaaccatcgctgactacattggacaccccgctcatgttgctttcggtaataaagccagatcattctgggaaaaattgttgatttttgactacactcctcgtaagtaa

SEQ ID NO: 568 - DNA, 306 bp, Artificial Sequence
  Synthetic
atggcagtcaagcatctaatcgttttaaaatttaaggatgaaattacggaggaccaaaaagaagaatttttcaagcgttacgtaaatcttgttaaccacatcccagccatgaaggacgtgtattggggtaaagatgtcactcagaagaacaagcacgaaggcttcactcacattgttgaggtcaccttcgaaagcgttgaaaccatcgctgactacattggtcaccccgctcatgttgctttcggtaacgtctatagatcattctgggaaaaattgttgatttttgactacactcctcgtaagtaa

SEQ ID NO: 569 - DNA, 306 bp, Artificial Sequence
  Synthetic
atggcagtcaagcatctaatcgttttaaaatttaaggatgaaattacggaggctcaaaaagaagaatttttcaagcgttacgtaaatcttgttaacataatcccagccatgaaggacgtgtattggggtaaagatgtcactcagaagaacaagcacgaaggcttcactcacattgttgaggtcaccttcgaaagcgttgaaaccatcgctgactacattatccaccccgctcatgttgctttcggtaaggtcgcaagatcattctgggaaaaattgttgatttttgactacactcctcgtaagtaa

SEQ ID NO: 570 - DNA, 306 bp, Artificial Sequence
  Synthetic
atggcagtcaagcatctaatcgttttaaaatttaaggatgaaattacggaggctcaaaaagaagaatttttcaagacatacgtaaatcttgttaaccacatcccagccatgaaggacgtgtattggggtaaagatgtcactcagaagaacaagcacgaaggcttcactcacattgttgaggtcaccttcgaaagcgttgaaaccatcgctgactacattatccaccccgctcatgttgccttcggtaagttttatagatcattctgggaaaaattgttgatttttgactacactcctcgtaagtaa

SEQ ID NO: 571 - DNA, 306 bp, Artificial Sequence
  Synthetic
atggcagtcaagcatctaatcgttttaaaatttaaggatgaaattacggaggaccaaaaagaagaatttttcaagacatacgtaaatcttgttaacagaatcccagccatgaaggacgtgtattggggtaaagatgtcactcagaagaacaagcatgaaggcttcactcacattgttgaggtcaccttcgaaagcgttgaaaccatcgctgactacattggtcaccccgctcatgttgctttcggtaataaggccagatcattctgggaaaaattgttgatttttgactacactcctcgtaagtaa

SEQ ID NO: 572 - DNA, 306 bp, Artificial Sequence
  Synthetic
atggcagtcaagcatctaatcgttttaaaatttaaggatgaaattacggaggaccaaaaagaagaatttttcaagcgttacgtaaatcttgttaacagaatcccagccatgaaggacgtgtattggggtaaagatgtcactcagaagaacaagcacgaaggcttcactcacattgttgaggtcaccttcgaaagcgttgaaaccatcgctgactacattatccaccccgctcatgttgctttcggtaatttttatagatcattctgggaaaaattgttgatttttgactacactcctcgtaagtaa

SEQ ID NO: 573 - DNA, 306 bp, Artificial Sequence
  Synthetic
atggcagtcaagcatctaatcgttttaaaatttaaggatgaaattacggaggaccaaaaagaaaagtttttcaagcactacgtatcacttgttaacataatcccagccatgaaggacgtgtattggggtaaagatgtcactcagaagaacaaggaagaaggctacactcacattgttgaggtcaccttcgaaagcgttgaaaccatcttggactacattatccaccccgctcatgttggtttcaaacgtgtctatagaaagtactgggaaaaattgttgatttttgactacactcctcgtaagtaa

SEQ ID NO: 574 - DNA, 306 bp, Artificial Sequence
  Synthetic
atggcagtcaagcatctaatcgttttaaaatttaaggatgaaattacggaggaccaaaaagaagaatttttcaagacatacgtaaatcttgttaaccacatcccagccatgaaggacgtgtattggggtaaagatgtcactcagaagaacaagcacgaaggcttcactcacattgttgaggtcaccttcgaaagcgttgaaaccatcgctgactacattatccaccccgctcatgttgctttcggtaactttgccagatcattctgggaaaaattgttgatttttgactacactcctcgtaagtaa

SEQ ID NO: 575 - DNA, 306 bp, Artificial Sequence
  Synthetic
atggcagtcaagcatctaatcgttttaaaatttaaggatgaaattacggaggaccaaaaagaagaatttttcaagagatacgtaaatcttgttaaccacatcccagccatgaaggacgtgtattggggtaaagatgtcactcagcaaaacaagcacgaaggcttcactcacattgttgaggtcaccttcgaaagcgttgaaaccatcgctgactacattatccaccccgctcatgttgctttcggtaacgtcgccagatcattctgggaaaaattgttgatttttgactacactcctcgtaagtaa

SEQ ID NO: 576 - DNA, 306 bp, Artificial Sequence
  Synthetic
atggcagtcaagcatctaatcgttttaaaatttaaggatgaaattacggaggaccaaaaagaagaatttatgaagcgttacgtaagtcttgttaaccacatcccagccatgaaggacgtgtattggggtaaagatgtcactcagcaaaacaagcacgaaggcttcactcacattgttgaggtcaccttcgaaagcgttgaaaccatcgctgactacattatccaccccgctcatgttgctttcggtaattttgccagatcattctgggaaaaattgttgatttttgactacactcctcgtaagtaa

SEQ ID NO: 577 - DNA, 306 bp, Artificial Sequence
  Synthetic
atggcagtcaagcatctaatcgttttaaaatttaaggatgaaattacggaggctcaaaaagaagaatttttcaagagatacgtaaatcttgttaacaggatcccagccatgaaggacgtgtattggggtaaagatgtcactcagaagaacaagcacgaaggcttcactcacattgttgaggtcaccttcgaaagcgttgaaaccatccaagactacattatccaccccgctcatgttgctttcggtaatgtcgccagatcattctgggaaaaattgttgatttttgactacactcctcgtaagtaa

SEQ ID NO: 578 - DNA, 306 bp, Artificial Sequence
  Synthetic
atggcagtcaagcatctaatcgttttaaaatttaaggatgaaattacggaggctcaaaaagaagaatttttcaagcgttacgtaaatcttgttaaccacatcccagccatgaaggacgtgtattggggtaaagatgtcactcagaagaacaagcacgaaggcttcactcacattgttgaggtcaccttcgaaagcgttgaaaccatcgctgactacattatccaccccgctcatgttgccttcggtaaagtcgctagatcattctgggaaaaattgttgatttttgactacactcctcgtaagtaa

SEQ ID NO: 579 - DNA, 306 bp, Artificial Sequence
  Synthetic
atggcagtcaagcatctaatcgttttaaaatttaaggatgaaattacggaggaccaaaaagaagaatttttcaagagatacgtaaatcttgttaaccgtatcccagccatgaaggacgtgtattggggtaaagatgtcactcagaagaacaagcacgaaggcttcactcacattgttgaggtcaccttcgaaagcgttgaaaccatcgctcaatacattggtcaccccgctcatgttgctttcggtaatgtcgccagatcattctgggaaaaattgttgatttttgactacactcctcgtaagtaa

SEQ ID NO: 580 - DNA, 306 bp, Artificial Sequence
  Synthetic
atggcagtcaagcatctaatcgttttaaaatttaaggatgaaattacggaggaccaaaaagaaaagtttttcaagacatacgtaagtcttgttaacataatcccagccatgaaggacgtgtattggggtaaagatgtcactcagaagaacaaggaagaaggctacactcacattgttgaggtcaccttcgaaagcgttgaaaccatcttggactacattatccaccccgctcatgttggtttcaaaaatgtctatagaaagttctgggaaaaattgttgatttttgactacactcctcgtaagtaa

SEQ ID NO: 581 - DNA, 306 bp, Artificial Sequence
  Synthetic
atggcagtcaagcatctaatcgttttaaaatttaaggatgaaattacggaggaccaaaaagaagaatttttcaagcgttacgtaaatcttgttaacagaatcccagccatgaaggacgtgtattggggtaaagatgtcactcagaagaacaagcacgaaggcttcactcacattgttgaggtcaccttcgaaagcgttgaaaccatcgctgactacattatccaccccgctcatgttgctttcggtaataaggccagatcattctgggaaaaattgttgatttttgactacactcctcgtaagtaa

SEQ ID NO: 582 - protein, 101 aa, Artificial Sequence; identical to SEQ ID NO: 1
  Synthetic

SEQ ID NO: 583 - protein, 101 aa, Artificial Sequence; identical to SEQ ID NO: 1
  Synthetic

SEQ ID NO: 584 - protein, 101 aa, Artificial Sequence; identical to SEQ ID NO: 1
  Synthetic

SEQ ID NO: 585 - protein, 101 aa, Artificial Sequence
  Synthetic
MAVKHLIVLKFKDEITNAQKEEFFKTYVNLVNIIPAMKDVYWGKDVTQKNKEEGYTHIVEVTFESVETIQDYIIHPAHVGFGDVYRSFWEKLLIFDYTPRK

SEQ ID NO: 586 - protein, 101 aa, Artificial Sequence
  Synthetic
MAVKHLIVLKFKDEITEAQKEEFFKAYVNLVNIIPAMKDVYWGKDVTQKNKEEGYTHIVEVTFESVETIQDYIIHPAHVGFGDVYRSFWEKLLIFDYTPRK

SEQ ID NO: 587 - protein, 101 aa, Artificial Sequence
  Synthetic
MAVKHLIVLKFKDEITEAQKEEFFKTYVNLVNIIPAMKDVYWGKDVTQKNKEEGYTHIVEVTFESVETIQSYIIHPAHVGFGDVYRSFWEKLLIFDYTPRK

SEQ ID NO: 588 - protein, 101 aa, Artificial Sequence
  Synthetic
MAVKHLIVLKFKDEITEAQKEEFFKTYVNLVNNIPAMKDVYWGKDVTQKNKEEGYTHIVEVTFESVETIQDYIIHPAHVGFGDVYRSFWEKLLIFDYTPRK

SEQ ID NO: 589 - protein, 101 aa, Artificial Sequence
  Synthetic
MAVKHLIVLKFKDEITEAQKEEFFKTYVNLVNIIPAMKQVYWGKDVTQKNKEEGYTHIVEVTFESVETIQDYIIHPAHVGFGDVYRSFWEKLLIFDYTPRK

SEQ ID NO: 590 - protein, 101 aa, Artificial Sequence
  Synthetic
MAVKHLIVLKFKDEITEAQKEEFFKTYVNLVNIIPALKDVYWGKDVTQKNKEEGYTHIVEVTFESVETIQDYIIHPAHVGFGDVYRSFWEKLLIFDYTPRK

SEQ ID NO: 591 - protein, 101 aa, Artificial Sequence
  Synthetic
MAVKHLIVLKFKDEITEAQKEEFFKTYVNLVNIIPAMKDVYWGKDVTQKNKEEGYTHIVEVTFESVETIQDYIIHPAHVGFGDVYRSFWEKLLIMDYTPRK

SEQ ID NO: 592 - protein, 101 aa, Artificial Sequence
  Synthetic
MAVKHLIVLKFKDEITEAQKEEFFKTYVTLVNIIPAMKDVYWGKDVTQKNKEEGYTHIVEVTFESVETIQDYIIHPAHVGFGDVYRSFWEKLLIFDYTPRK

SEQ ID NO: 593 - protein, 101 aa, Artificial Sequence
  Synthetic
MAVKHLIVLKFKDEITEAQKEEFFKTYVNLVNIIPAMKDVYWGKDVTQKNKEEGYTHIVEVTFESVETIQDYIIHPAHVGFGDFYRSFWEKLLIFDYTPRK

SEQ ID NO: 594 - protein, 101 aa, Artificial Sequence
  Synthetic
MAVKHLIVLKFKDEITEAQKEEFFKTYVNLVNIIPAMKDVYWGKDVTQKNKEEGYTHIVEVTFESVETIQDYIIHPAHVGFGQVYRSFWEKLLIFDYTPRK

SEQ ID NO: 595 - protein, 101 aa, Artificial Sequence
  Synthetic
MAVKHLIVLKFKDEITEAQKEEFFKTYVNLLNIIPAMKDVYWGKDVTQKNKEEGYTHIVEVTFESVETIQDYIIHPAHVGFGDVYRSFWEKLLIFDYTPRK

SEQ ID NO: 596 - protein, 101 aa, Artificial Sequence
  Synthetic
MAVKHLIVLKFKDEITEDQKEEFFKTYVNLVNIIPAMKDVYWGKDVTQKNKEEGYTHIVEVTFESVETIQDYIIHPAHVGFGDVYRSFWEKLLIFDYTPRK

SEQ ID NO: 597 - protein, 101 aa, Artificial Sequence
  Synthetic
MAVKHLIVLKFKDEITEAQKEEFFKTYVNLVNIIPAMKGVYWGKDVTQKNKEEGYTHIVEVTFESVETIQDYIIHPAHVGFGDVYRSFWEKLLIFDYTPRK

SEQ ID NO: 598 - protein, 101 aa, Artificial Sequence
  Synthetic
MAVKHLIVLKFKDEITEAQKEEFFKTYVNLVNIIPAMKDVYWGKDVTQKNKEEGYTHIVEVTFESVETIQDYIIHPAHVGFGAVYRSFWEKLLIFDYTPRK

SEQ ID NO: 599 - protein, 101 aa, Artificial Sequence
  Synthetic
MAVKHLIVLKFKDEITEAQKEEFFKTYVNLVNRIPAMKDVYWGKDVTQKNKEEGYTHIVEVTFESVETIQDYIIHPAHVGFGDVYRSFWEKLLIFDYTPRK

SEQ ID NO: 600 - protein, 101 aa, Artificial Sequence
  Synthetic
MAVKHLIVLKFKDEITEAQKEEFFKTYVNLVNHIPAMKDVYWGKDVTQKNKEEGYTHIVEVTFESVETIQDYIIHPAHVGFGDVYRSFWEKLLIFDYTPRK

SEQ ID NO: 601 - protein, 101 aa, Artificial Sequence
  Synthetic
MAVKHLIVLKFKDEITEAQKEEFFKHYVNLVNIIPAMKDVYWGKDVTQKNKEEGYTHIVEVTFESVETIQDYIIHPAHVGFGDVYRSFWEKLLIFDYTPRK

SEQ ID NO: 602 - protein, 101 aa, Artificial Sequence
  Synthetic
MAVKHLIVLKFKDEITEAQKEEFFKTYVNLVNIIPAMKDVYWGKDVTQKNKEEGYTHIVEVTFESVETIQDYIIHPAHVAFGDVYRSFWEKLLIFDYTPRK

SEQ ID NO: 603 - protein, 101 aa, Artificial Sequence
  Synthetic
MAVKHLIVLKFKDEITEAQKEEFFKTYVNLVNIIPAMKDVYWGKDVTQKNKEEGYTHIVEVTFESVETIQDYIIHPAHVGFGNVYRSFWEKLLIFDYTPRK

SEQ ID NO: 604 - protein, 101 aa, Artificial Sequence
  Synthetic
MAVKHLIVLKFKDEITEAQKEEFFKAYVNLVNIIPAMKQVYWGKDVTQKNKEEGYTHIVEVTFESVETIQDYIIHPAHVGFGQVYRSFWEKLLIFDYTPRK

SEQ ID NO: 605 - protein, 101 aa, Artificial Sequence
  Synthetic
MAVKHLIVLKFKDEITEAQKEEFFKAYVTLVNIIPAMKDVYWGKDVTQKNKEEGYTHIVEVTFESVETIQDYIIHPAHVGFGDVYRSFWEKLLIFDYTPRK

SEQ ID NO: 606 - protein, 101 aa, Artificial Sequence
  Synthetic
MAVKHLIVLKFKDEITEAQKEEFFKTYVNLVNIIPAMKDVYWGKDVTQKNKEEGYTHIVEVTFESVETIQSYIIHPAHVGFGNVYRSFWEKLLIMDYTPRK

SEQ ID NO: 607 - protein, 101 aa, Artificial Sequence
  Synthetic
MAVKHLIVLKFKDEITEAQKEEFFKTYVNLVNIIPAMKGVYWGKDVTQKNKEEGYTHIVEVTFESVETIQSYIIHPAHVGFGNVYRSFWEKLLIFDYTPRK

SEQ ID NO: 608 - protein, 101 aa, Artificial Sequence
  Synthetic
MAVKHLIVLKFKDEITEAQKEEFFKTYVNLVNIIPAMKQVYWGKDVTQKNKEEGYTHIVEVTFESVETIQDYIIHPAHVGFGQVYRSFWEKLLIFDYTPRK

SEQ ID NO: 609 - protein, 101 aa, Artificial Sequence
  Synthetic
MAVKHLIVLKFKDEITEAQKEEFFKHYVTLVNRIPAMKDVYWGKDVTQKNKEEGYTHIVEVTFESVETIQDYIIHPAHVGFGDVYRSFWEKLLIFDYTPRK

SEQ ID NO: 610 - protein, 101 aa, Artificial Sequence
  Synthetic
MAVKHLIVLKFKDEITEAQKEEFFKAYVNLVNIIPAMKDVYWGKDVTQKNKEEGYTHIVEVTFESVETIQDYIIHPAHVGFGNVYRSFWEKLLIMDYTPRK

SEQ ID NO: 611 - protein, 101 aa, Artificial Sequence
  Synthetic
MAVKHLIVLKFKDEITEAQKEEFFKTYVNLVNRIPAMKQVYWGKDVTQKNKEEGYTHIVEVTFESVETIQDYIIHPAHVGFGDFYRSFWEKLLIFDYTPRK

SEQ ID NO: 612 - protein, 101 aa, Artificial Sequence
  Synthetic
MAVKHLIVLKFKDEITEAQKEEFFKTYVNLVNIIPAMKDVYWGKDVTQKNKEEGYTHIVEVTFESVETIQSYIIHPAHVGFGQVYRSFWEKLLIFDYTPRK

SEQ ID NO: 613 - protein, 101 aa, Artificial Sequence
  Synthetic
MAVKHLIVLKFKDEITEAQKEEFFKHYVNLVNRIPAMKDVYWGKDVTQKNKEEGYTHIVEVTFESVETIQDYIIHPAHVAFGDVYRSFWEKLLIFDYTPRK

SEQ ID NO: 614 - protein, 101 aa, Artificial Sequence
  Synthetic
MAVKHLIVLKFKDEITEAQKEEFFKTYVNLLNIIPAMKDVYWGKDVTQKNKEEGYTHIVEVTFESVETIQSYIIHPAHVGFGQVYRSFWEKLLIFDYTPRK

SEQ ID NO: 615 - protein, 101 aa, Artificial Sequence
  Synthetic
MAVKHLIVLKFKDEITEAQKEEFFKTYVNLVNNIPAMKGVYWGKDVTQKNKEEGYTHIVEVTFESVETIQDYIIHPAHVGFGQVYRSFWEKLLIFDYTPRK

SEQ ID NO: 616 - protein, 101 aa, Artificial Sequence
  Synthetic
MAVKHLIVLKFKDEITEAQKEEFFKTYVNLVNHIPAMKDVYWGKDVTQKNKEEGYTHIVEVTFESVETIQDYIIHPAHVGFGQVYRSFWEKLLIMDYTPRK

SEQ ID NO: 617 - protein, 101 aa, Artificial Sequence
  Synthetic
MAVKHLIVLKFKDEITEAQKEEFFKTYVTLVNNIPAMKDVYWGKDVTQKNKEEGYTHIVEVTFESVETIQSYIIHPAHVGFGDVYRSFWEKLLIFDYTPRK

SEQ ID NO: 618 - protein, 101 aa, Artificial Sequence
  Synthetic
MAVKHLIVLKFKDEITEAQKEEFFKHYVNLVNNIPAMKDVYWGKDVTQKNKEEGYTHIVEVTFESVETIQDYIIHPAHVAFGDVYRSFWEKLLIFDYTPRK

SEQ ID NO: 619 - protein, 101 aa, Artificial Sequence
  Synthetic
MAVKHLIVLKFKDEITNAQKEEFFKTYVTLVNIIPAMKDVYWGKDVTQKNKEEGYTHIVEVTFESVETIQDYIIHPAHVAFGDVYRSFWEKLLIFDYTPRK

SEQ ID NO: 620 - protein, 101 aa, Artificial Sequence
  Synthetic
MAVKHLIVLKFKDEITEAQKEEFFKTYVTLVNHIPAMKDVYWGKDVTQKNKEEGYTHIVEVTFESVETIQSYIIHPAHVGFGDVYRSFWEKLLIFDYTPRK

SEQ ID NO: 621 - protein, 101 aa, Artificial Sequence
  Synthetic
MAVKHLIVLKFKDEITEAQKEEFFKHYVNLLNIIPAMKDVYWGKDVTQKNKEEGYTHIVEVTFESVETIQDYIIHPAHVGFGAVYRSFWEKLLIFDYTPRK

SEQ ID NO: 622 - protein, 101 aa, Artificial Sequence
  Synthetic
MAVKHLIVLKFKDEITEAQKEEFFKTYVNLVNRIPAMKGVYWGKDVTQKNKEEGYTHIVEVTFESVETIQDYIIHPAHVGFGNVYRSFWEKLLIFDYTPRK

SEQ ID NO: 623 - protein, 101 aa, Artificial Sequence
  Synthetic
MAVKHLIVLKFKDEITEAQKEEFFKTYVNLLNIIPAMKDVYWGKDVTQKNKEEGYTHIVEVTFESVETIQDYIIHPAHVGFGNFYRSFWEKLLIFDYTPRK

SEQ ID NO: 624 - protein, 101 aa, Artificial Sequence
  Synthetic
MAVKHLIVLKFKDEITNAQKEEFFKAYVTLVNIIPAMKDVYWGKDVTQKNKEEGYTHIVEVTFESVETIQDYIIHPAHVGFGDVYRSFWEKLLIFDYTPRK

SEQ ID NO: 625 - protein, 101 aa, Artificial Sequence
  Synthetic
MAVKHLIVLKFKDEITEAQKEEFFKTYVNLLNIIPAMKGVYWGKDVTQKNKEEGYTHIVEVTFESVETIQSYIIHPAHVGFGDVYRSFWEKLLIFDYTPRK

SEQ ID NO: 626 - protein, 101 aa, Artificial Sequence
  Synthetic
MAVKHLIVLKFKDEITEAQKEEFFKHYVNLLNIIPAMKDVYWGKDVTQKNKEEGYTHIVEVTFESVETIQDYIIHPAHVGFGNVYRSFWEKLLIFDYTPRK

SEQ ID NO: 627 - protein, 101 aa, Artificial Sequence
  Synthetic
MAVKHLIVLKFKDEITEAQKEEFFKTYVNLVNHIPAMKQVYWGKDVTQKNKEEGYTHIVEVTFESVETIQDYIIHPAHVAFGDVYRSFWEKLLIFDYTPRK

SEQ ID NO: 628 - protein, 101 aa, Artificial Sequence
  Synthetic
MAVKHLIVLKFKDEITEAQKEEFFKTYVNLVNIIPAMKDVYWGKDVTQKNKEEGYTHIVEVTFESVETIQDYIIHPAHVGFGNVYRSFWEKLLIMDYTPRK

SEQ ID NO: 629 - protein, 101 aa, Artificial Sequence
  Synthetic
MAVKHLIVLKFKDEITEAQKEEFFKTYVTLVNIIPAMKGVYWGKDVTQKNKEEGYTHIVEVTFESVETIQDYIIHPAHVGFGDFYRSFWEKLLIFDYTPRK

SEQ ID NO: 630 - protein, 101 aa, Artificial Sequence
  Synthetic
MAVKHLIVLKFKDEITEAQKEEFFKTYVNLVNIIPAMKGVYWGKDVTQKNKEEGYTHIVEVTFESVETIQDYIIHPAHVGFGAVYRSFWEKLLIFDYTPRK

SEQ ID NO: 631 - protein, 101 aa, Artificial Sequence
  Synthetic
MAVKHLIVLKFKDEITEAQKEEFFKHYVTLVNIIPAMKQVYWGKDVTQKNKEEGYTHIVEVTFESVETIQDYIIHPAHVGFGDVYRSFWEKLLIFDYTPRK

SEQ ID NO: 632 - protein, 101 aa, Artificial Sequence
  Synthetic
MAVKHLIVLKFKDEITNAQKEEFFKTYVNLVNNIPAMKDVYWGKDVTQKNKEEGYTHIVEVTFESVETIQDYIIHPAHVGFGDFYRSFWEKLLIFDYTPRK

SEQ ID NO: 633 - protein, 101 aa, Artificial Sequence
  Synthetic
MAVKHLIVLKFKDEITEAQKEEFFKHYVNLVNIIPAMKDVYWGKDVTQKNKEEGYTHIVEVTFESVETIQDYIIHPAHVGFGQVYRSFWEKLLIMDYTPRK

SEQ ID NO: 634 - protein, 101 aa, Artificial Sequence
  Synthetic
MAVKHLIVLKFKDEITNAQKEEFFKTYVNLVNRIPAMKQVYWGKDVTQKNKEEGYTHIVEVTFESVETIQDYIIHPAHVGFGDVYRSFWEKLLIFDYTPRK

SEQ ID NO: 635 - protein, 101 aa, Artificial Sequence
  Synthetic
MAVKHLIVLKFKDEITNAQKEEFFKTYVNLVNIIPAMKDVYWGKDVTQKNKEEGYTHIVEVTFESVETIQSYIIHPAHVAFGDVYRSFWEKLLIFDYTPRK

SEQ ID NO: 636 - protein, 101 aa, Artificial Sequence
  Synthetic
MAVKHLIVLKFKDEITEAQKEEFFKTYVTLLNIIPAMKDVYWGKDVTQKNKEEGYTHIVEVTFESVETIQDYIIHPAHVGFGNVYRSFWEKLLIFDYTPRK

SEQ ID NO: 637 - protein, 101 aa, Artificial Sequence
  Synthetic
MAVKHLIVLKFKDEITEAQKEEFFKTYVNLVNNIPAMKDVYWGKDVTQKNKEEGYTHIVEVTFESVETIQDYIIHPAHVGFGDVYRSFWEKLLIMDYTPRK

SEQ ID NO: 638 - protein, 101 aa, Artificial Sequence
  Synthetic
MAVKHLIVLKFKDEITEAQKEEFFKAYVTLLNIIPAMKDVYWGKDVTQKNKEEGYTHIVEVTFESVETIQDYIIHPAHVGFGDVYRSFWEKLLIFDYTPRK

SEQ ID NO: 639 - protein, 101 aa, Artificial Sequence
  Synthetic
MAVKHLIVLKFKDEITEAQKEEFFKTYVNLVNIIPAMKQVYWGKDVTQKNKEEGYTHIVEVTFESVETIQDYIIHPAHVGFGDVYRSFWEKLLIMDYTPRK

SEQ ID NO: 640 - protein, 101 aa, Artificial Sequence
  Synthetic
MAVKHLIVLKFKDEITEAQKEEFFKTYVNLVNNIPAMKDVYWGKDVTQKNKEEGYTHIVEVTFESVETIQSYIIHPAHVAFGDVYRSFWEKLLIFDYTPRK

SEQ ID NO: 641 - protein, 101 aa, Artificial Sequence
  Synthetic
MAVKHLIVLKFKDEITNAQKEEFFKTYVNLVNRIPAMKDVYWGKDVTQKNKEEGYTHIVEVTFESVETIQDYIIHPAHVGFGDVYRSFWEKLLIMDYTPRK

SEQ ID NO: 642 - protein, 101 aa, Artificial Sequence
  Synthetic
MAVKHLIVLKFKDEITNAQKEEFFKTYVNLVNIIPAMKDVYWGKDVTQKNKEEGYTHIVEVTFESVETIQSYIIHPAHVGFGDVYRSFWEKLLIMDYTPRK

SEQ ID NO: 643 - protein, 101 aa, Artificial Sequence
  Synthetic
MAVKHLIVLKFKDEITEAQKEEFFKAYVNLVNIIPAMKDVYWGKDVTQKNKEEGYTHIVEVTFESVETIQDYIIHPAHVGFGDVYRSFWEKLLIMDYTPRK

SEQ ID NO: 644 - protein, 101 aa, Artificial Sequence
  Synthetic
MAVKHLIVLKFKDEITEAQKEEFFKAYVNLLNIIPAMKQVYWGKDVTQKNKEEGYTHIVEVTFESVETIQDYIIHPAHVGFGDVYRSFWEKLLIFDYTPRK

SEQ ID NO: 645 - protein, 101 aa, Artificial Sequence
  Synthetic
MAVKHLIVLKFKDEITEDQKEEFFKHYVNLVNIIPAMKDVYWGKDVTQKNKEEGYTHIVEVTFESVETIQDYIIHPAHVGFGDVYRSFWEKLLIFDYTPRK

SEQ ID NO: 646 - protein, 101 aa, Artificial Sequence
  Synthetic
MAVKHLIVLKFKDEITEDQKEEFFKTYVNLVNIIPAMKQVYWGKDVTQKNKEEGYTHIVEVTFESVETIQDYIIHPAHVGFGDVYRSFWEKLLIFDYTPRK

SEQ ID NO: 647 - protein, 101 aa, Artificial Sequence
  Synthetic
MAVKHLIVLKFKDEITEAQKEEFFKTYVNLVNRIPAMKDVYWGKDVTQKNKEEGYTHIVEVTFESVETIQDYIIHPAHVGFGAVYRSFWEKLLIFDYTPRK

SEQ ID NO: 648 - protein, 101 aa, Artificial Sequence
  Synthetic
MAVKHLIVLKFKDEITEAQKEEFFKTYVNLVNIIPAMKQVYWGKDVTQKNKEEGYTHIVEVTFESVETIQSYIIHPAHVAFGDVYRSFWEKLLIFDYTPRK

SEQ ID NO: 649 - protein, 101 aa, Artificial Sequence
  Synthetic
MAVKHLIVLKFKDEITEAQKEEFFKHYVNLVNIIPAMKDVYWGKDVTQKNKEEGYTHIVEVTFESVETIQDYIIHPAHVGFGNVYRSFWEKLLIFDYTPRK

SEQ ID NO: 650 - protein, 101 aa, Artificial Sequence
  Synthetic
MAVKHLIVLKFKDEITEAQKEEFFKTYVTLVNIIPAMKGVYWGKDVTQKNKEEGYTHIVEVTFESVETIQDYIIHPAHVGFGNVYRSFWEKLLIFDYTPRK

SEQ ID NO: 651 - protein, 101 aa, Artificial Sequence
  Synthetic
MAVKHLIVLKFKDEITNAQKEEFFKTYVNLVNNIPAMKDVYWGKDVTQKNKEEGYTHIVEVTFESVETIQDYIIHPAHVGFGDVYRSFWEKLLIMDYTPRK

SEQ ID NO: 652 - protein, 101 aa, Cannabis Sativa; identical to SEQ ID NO: 1

SEQ ID NO: 653 - protein, 101 aa, Artificial Sequence
  Synthetic
MAVKHLIVLKFKDEITEAQKEEFFKTYVTLVNIIPAMKGVYWGKDVTQKNKEEGYTHIVEVTFESVETIQDYIIHPAHVGFGDVYRSFWEKLLIFDYTPRK

SEQ ID NO: 654 - protein, 101 aa, Artificial Sequence
  Synthetic
MAVKHLIVLKFKDEITEAQKEEFFKTYVNLVNIIPAMKGVYWGKDVTQKNKEEGYTHIVEVTFESVETIQSYIIHPAHVGFGDFYRSFWEKLLIFDYTPRK

SEQ ID NO: 655 - protein, 101 aa, Artificial Sequence
  Synthetic
MAVKHLIVLKFKDEITEDQKEEFFKTYVNLLNIIPAMKGVYWGKDVTQKNKEEGYTHIVEVTFESVETIQDYIIHPAHVGFGDVYRSFWEKLLIFDYTPRK

SEQ ID NO: 656 - protein, 101 aa, Artificial Sequence
  Synthetic
MAVKHLIVLKFKDEITEDQKEEFFKTYVNLVNIIPALKDVYWGKDVTQKNKEEGYTHIVEVTFESVETIQDYIIHPAHVGFGDVYRSFWEKLLIFDYTPRK

SEQ ID NO: 657 - protein, 101 aa, Artificial Sequence
  Synthetic
MAVKHLIVLKFKDEITNDQKEEFFKTYVNLVNNIPAMKDVYWGKDVTQKNKEEGYTHIVEVTFESVETIQDYIIHPAHVGFGDVYRSFWEKLLIFDYTPRK

SEQ ID NO: 658 - protein, 101 aa, Artificial Sequence
  Synthetic
MAVKHLIVLKFKDEITEDQKEEFFKTYVNLVNRIPAMKGVYWGKDVTQKNKEEGYTHIVEVTFESVETIQDYIIHPAHVGFGDVYRSFWEKLLIFDYTPRK

SEQ ID NO: 659 - protein, 101 aa, Artificial Sequence
  Synthetic
MAVKHLIVLKFKDEITEAQKEEFFKTYVNLLNIIPAMKGVYWGKDVTQKNKEEGYTHIVEVTFESVETIQDYIIHPAHVGFGDFYRSFWEKLLIFDYTPRK

SEQ ID NO: 660 - protein, 101 aa, Artificial Sequence
  Synthetic
MAVKHLIVLKFKDEITNAQKEEFFKAYVNLVNIIPALKDVYWGKDVTQKNKEEGYTHIVEVTFESVETIQDYIIHPAHVGFGDVYRSFWEKLLIFDYTPRK

SEQ ID NO: 661 - protein, 101 aa, Artificial Sequence
  Synthetic
MAVKHLIVLKFKDEITEAQKEEFFKTYVNLVNIIPAMKQVYWGKDVTQKNKEEGYTHIVEVTFESVETIQSYIIHPAHVGFGAVYRSFWEKLLIFDYTPRK

SEQ ID NO: 662 - protein, 101 aa, Artificial Sequence
  Synthetic
MAVKHLIVLKFKDEITNDQKEEFFKTYVNLVNIIPAMKGVYWGKDVTQKNKEEGYTHIVEVTFESVETIQDYIIHPAHVGFGDVYRSFWEKLLIFDYTPRK

SEQ ID NO: 663 - protein, 101 aa, Artificial Sequence
  Synthetic
MAVKHLIVLKFKDEITEAQKEEFFKTYVNLVNHIPAMKGVYWGKDVTQKNKEEGYTHIVEVTFESVETIQDYIIHPAHVGFGQVYRSFWEKLLIFDYTPRK

SEQ ID NO: 664 - protein, 101 aa, Artificial Sequence
  Synthetic
MAVKHLIVLKFKDEITEAQKEEFFKAYVTLVNRIPAMKDVYWGKDVTQKNKEEGYTHIVEVTFESVETIQDYIIHPAHVGFGDVYRSFWEKLLIFDYTPRK

SEQ ID NO: 665 - protein, 101 aa, Artificial Sequence
  Synthetic
MAVKHLIVLKFKDEITEAQKEEFFKHYVNLVNHIPAMKDVYWGKDVTQKNKEEGYTHIVEVTFESVETIQDYIIHPAHVGFGQVYRSFWEKLLIFDYTPRK

SEQ ID NO: 666 - protein, 101 aa, Artificial Sequence
  Synthetic
MAVKHLIVLKFKDEITEDQKEEFFKTYVNLVNIIPAMKDVYWGKDVTQKNKEEGYTHIVEVTFESVETIQSYIIHPAHVAFGDVYRSFWEKLLIFDYTPRK

SEQ ID NO: 667 - protein, 101 aa, Artificial Sequence
  Synthetic
MAVKHLIVLKFKDEITEAQKEEFFKTYVTLVNNIPAMKDVYWGKDVTQKNKEEGYTHIVEVTFESVETIQDYIIHPAHVGFGDVYRSFWEKLLIFDYTPRK

SEQ ID NO: 668 - protein, 101 aa, Artificial Sequence
  Synthetic
MAVKHLIVLKFKDEITEAQKEEFFKTYVNLLNRIPAMKDVYWGKDVTQKNKEEGYTHIVEVTFESVETIQDYIIHPAHVGFGNVYRSFWEKLLIFDYTPRK

SEQ ID NO: 669 - protein, 101 aa, Artificial Sequence
  Synthetic
MAVKHLIVLKFKDEITNAQKEEFFKHYVNLVNIIPALKDVYWGKDVTQKNKEEGYTHIVEVTFESVETIQDYIIHPAHVGFGDVYRSFWEKLLIFDYTPRK

SEQ ID NO: 670 - skipped

SEQ ID NO: 671 - protein, 101 aa, Artificial Sequence
  Synthetic
MAVKHLIVLKFKDEITEAQKEEFFKTYVNLVNRIPAMKDVYWGKDVTQKNKEEGYTHIVEVTFESVETIQDYIIHPAHVGFGDVYRSFWEKLLIMDYTPRK

SEQ ID NO: 672 - protein, 101 aa, Artificial Sequence
  Synthetic
MAVKHLIVLKFKDEITEAQKEEFFKTYVNLVNHIPAMKQVYWGKDVTQKNKEEGYTHIVEVTFESVETIQSYIIHPAHVGFGDVYRSFWEKLLIFDYTPRK

SEQ ID NO: 673 - protein, 101 aa, Artificial Sequence
  Synthetic
MAVKHLIVLKFKDEITEAQKEEFFKTYVNLVNNIPAMKQVYWGKDVTQKNKEEGYTHIVEVTFESVETIQDYIIHPAHVGFGDVYRSFWEKLLIMDYTPRK

SEQ ID NO: 674 - protein, 101 aa, Artificial Sequence
  Synthetic
MAVKHLIVLKFKDEITEDQKEEFFKTYVNLVNIIPAMKQVYWGKDVTQKNKEEGYTHIVEVTFESVETIQDYIIHPAHVGFGDFYRSFWEKLLIFDYTPRK

SEQ ID NO: 675 - protein, 101 aa, Artificial Sequence
  Synthetic
MAVKHLIVLKFKDEITEAQKEEFFKAYVTLVNHIPAMKDVYWGKDVTQKNKEEGYTHIVEVTFESVETIQDYIIHPAHVGFGDVYRSFWEKLLIFDYTPRK

SEQ ID NO: 676 - protein, 101 aa, Artificial Sequence
  Synthetic
MAVKHLIVLKFKDEITEAQKEEFFKTYVTLVNRIPAMKQVYWGKDVTQKNKEEGYTHIVEVTFESVETIQDYIIHPAHVGFGDVYRSFWEKLLIFDYTPRK

SEQ ID NO: 677 - protein, 101 aa, Artificial Sequence
  Synthetic
MAVKHLIVLKFKDEITNAQKEEFFKTYVNLVNIIPAMKDVYWGKDVTQKNKEEGYTHIVEVTFESVETIQDYIIHPAHVGFGNVYRSFWEKLLIMDYTPRK

SEQ ID NO: 678 - protein, 101 aa, Artificial Sequence
  Synthetic
MAVKHLIVLKFKDEITEAQKEEFFKTYVTLLNIIPAMKDVYWGKDVTQKNKEEGYTHIVEVTFESVETIQDYIIHPAHVGFGDVYRSFWEKLLIFDYTPRK

SEQ ID NO: 679 - protein, 101 aa, Artificial Sequence
  Synthetic
MAVKHLIVLKFKDEITNAQKEEFFKTYVNLLNNIPAMKDVYWGKDVTQKNKEEGYTHIVEVTFESVETIQDYIIHPAHVGFGDVYRSFWEKLLIFDYTPRK

SEQ ID NO: 680 - protein, 101 aa, Artificial Sequence
  Synthetic
MAVKHLIVLKFKDEITNAQKEEFFKTYVNLVNIIPAMKDVYWGKDVTQKNKEEGYTHIVEVTFESVETIQDYIIHPAHVAFGNVYRSFWEKLLIFDYTPRK

SEQ ID NO: 681 - protein, 101 aa, Artificial Sequence
  Synthetic
MAVKHLIVLKFKDEITEAQKEEFFKTYVNLLNIIPAMKDVYWGKDVTQKNKEEGYTHIVEVTFESVETIQSYIIHPAHVGFGNVYRSFWEKLLIFDYTPRK

SEQ ID NO: 682 - protein, 101 aa, Artificial Sequence
  Synthetic
MAVKHLIVLKFKDEITNAQKEEFFKAYVNLVNIIPAMKDVYWGKDVTQKNKEEGYTHIVEVTFESVETIQDYIIHPAHVAFGDVYRSFWEKLLIFDYTPRK

SEQ ID NO: 683 - protein, 101 aa, Artificial Sequence
  Synthetic
MAVKHLIVLKFKDEITEAQKEEFFKTYVNLVNRIPAMKGVYWGKDVTQKNKEEGYTHIVEVTFESVETIQSYIIHPAHVGFGDVYRSFWEKLLIFDYTPRK

SEQ ID NO: 684 - protein, 101 aa, Artificial Sequence
  Synthetic
MAVKHLIVLKFKDEITEDQKEEFFKHYVNLVNIIPAMKQVYWGKDVTQKNKEEGYTHIVEVTFESVETIQDYIIHPAHVGFGDVYRSFWEKLLIFDYTPRK

SEQ ID NO: 685 - protein, 101 aa, Artificial Sequence
  Synthetic
MAVKHLIVLKFKDEITEAQKEEFFKTYVNLVNRIPAMKGVYWGKDVTQKNKEEGYTHIVEVTFESVETIQDYIIHPAHVGFGDVYRSFWEKLLIMDYTPRK

SEQ ID NO: 686 - protein, 101 aa, Artificial Sequence
  Synthetic
MAVKHLIVLKFKDEITEAQKEEFFKTYVNLVNIIPAMKGVYWGKDVTQKNKEEGYTHIVEVTFESVETIQSYIIHPAHVGFGDVYRSFWEKLLIFDYTPRK

SEQ ID NO: 687 - protein, 101 aa, Artificial Sequence
  Synthetic
MAVKHLIVLKFKDEITEAQKEEFFKTYVNLLNRIPAMKDVYWGKDVTQKNKEEGYTHIVEVTFESVETIQDYIIHPAHVGFGDVYRSFWEKLLIFDYTPRK

SEQ ID NO: 688 - protein, 101 aa, Artificial Sequence
  Synthetic
MAVKHLIVLKFKDEITEAQKEEFFKHYVTLVNIIPAMKDVYWGKDVTQKNKEEGYTHIVEVTFESVETIQDYIIHPAHVGFGDFYRSFWEKLLIFDYTPRK

SEQ ID NO: 689 - protein, 101 aa, Artificial Sequence
  Synthetic
MAVKHLIVLKFKDEITNAQKEEFFKHYVTLVNIIPAMKDVYWGKDVTQKNKEEGYTHIVEVTFESVETIQDYIIHPAHVGFGDVYRSFWEKLLIFDYTPRK

SEQ ID NO: 690 - protein, 101 aa, Artificial Sequence
  Synthetic
MAVKHLIVLKFKDEITNAQKEEFFKTYVNLVNIIPALKDVYWGKDVTQKNKEEGYTHIVEVTFESVETIQDYIIHPAHVGFGQVYRSFWEKLLIFDYTPRK

SEQ ID NO: 691 - protein, 101 aa, Artificial Sequence
  Synthetic
MAVKHLIVLKFKDEITEAQKEEFFKTYVTLVNNIPAMKDVYWGKDVTQKNKEEGYTHIVEVTFESVETIQDYIIHPAHVGFGQVYRSFWEKLLIFDYTPRK

SEQ ID NO: 692 - protein, 101 aa, Artificial Sequence
  Synthetic
MAVKHLIVLKFKDEITEAQKEEFFKHYVNLVNIIPAMKQVYWGKDVTQKNKEEGYTHIVEVTFESVETIQDYIIHPAHVGFGQVYRSFWEKLLIFDYTPRK

SEQ ID NO: 693 - protein, 101 aa, Artificial Sequence
  Synthetic
MAVKHLIVLKFKDEITNAQKEEFFKTYVNLVNIIPAMKGVYWGKDVTQKNKEEGYTHIVEVTFESVETIQDYIIHPAHVGFGAVYRSFWEKLLIFDYTPRK

SEQ ID NO: 694 - protein, 101 aa, Artificial Sequence
  Synthetic
MAVKHLIVLKFKDEITEAQKEEFFKHYVNLVNIIPAMKGVYWGKDVTQKNKEEGYTHIVEVTFESVETIQDYIIHPAHVGFGDFYRSFWEKLLIFDYTPRK

SEQ ID NO: 695 - protein, 101 aa, Artificial Sequence
  Synthetic
MAVKHLIVLKFKDEITEDQKEEFFKTYVNLVNIIPAMKQVYWGKDVTQKNKEEGYTHIVEVTFESVETIQSYIIHPAHVGFGDVYRSFWEKLLIFDYTPRK

SEQ ID NO: 696 - protein, 101 aa, Artificial Sequence
  Synthetic
MAVKHLIVLKFKDEITNAQKEEFFKTYVNLVNHIPAMKDVYWGKDVTQKNKEEGYTHIVEVTFESVETIQSYIIHPAHVGFGDVYRSFWEKLLIFDYTPRK

SEQ ID NO: 697 - protein, 101 aa, Artificial Sequence
  Synthetic
MAVKHLIVLKFKDEITNAQKEEFFKAYVNLVNIIPAMKGVYWGKDVTQKNKEEGYTHIVEVTFESVETIQDYIIHPAHVGFGDVYRSFWEKLLIFDYTPRK

SEQ ID NO: 698 - protein, 101 aa, Artificial Sequence
  Synthetic
MAVKHLIVLKFKDEITEAQKEEFFKHYVNLVNIIPAMKQVYWGKDVTQKNKEEGYTHIVEVTFESVETIQDYIIHPAHVGFGDVYRSFWEKLLIFDYTPRK

SEQ ID NO: 699 - protein, 101 aa, Artificial Sequence
  Synthetic
MAVKHLIVLKFKDEITEAQKEEFFKTYVTLLNIIPAMKQVYWGKDVTQKNKEEGYTHIVEVTFESVETIQDYIIHPAHVGFGDVYRSFWEKLLIFDYTPRK

SEQ ID NO: 700 - protein, 101 aa, Artificial Sequence
  Synthetic
MAVKHLIVLKFKDEITEDQKEEFFKTYVTLLNIIPAMKDVYWGKDVTQKNKEEGYTHIVEVTFESVETIQDYIIHPAHVGFGDVYRSFWEKLLIFDYTPRK

SEQ ID NO: 701 - protein, 101 aa, Artificial Sequence
  Synthetic
MAVKHLIVLKFKDEITEDQKEEFFKHYVNLVNIIPAMKDVYWGKDVTQKNKEEGYTHIVEVTFESVETIQDYIIHPAHVGFGDVYRSFWEKLLIMDYTPRK

SEQ ID NO: 702 - protein, 101 aa, Artificial Sequence
  Synthetic
MAVKHLIVLKFKDEITEAQKEEFFKTYVNLLNIIPAMKGVYWGKDVTQKNKEEGYTHIVEVTFESVETIQDYIIHPAHVGFGDVYRSFWEKLLIMDYTPRK

SEQ ID NO: 703 - protein, 101 aa, Artificial Sequence
  Synthetic
MAVKHLIVLKFKDEITEAQKEEFFKTYVNLLNHIPAMKDVYWGKDVTQKNKEEGYTHIVEVTFESVETIQSYIIHPAHVGFGDVYRSFWEKLLIFDYTPRK

SEQ ID NO: 704 - protein, 101 aa, Artificial Sequence
  Synthetic
MAVKHLIVLKFKDEITNAQKEEFFKTYVNLVNIIPAMKGVYWGKDVTQKNKEEGYTHIVEVTFESVETIQDYIIHPAHVGFGDVYRSFWEKLLIFDYTPRK

SEQ ID NO: 705 - protein, 101 aa, Artificial Sequence
  Synthetic
MAVKHLIVLKFKDEITNDQKEEFFKTYVTLLNIIPAMKQVYWGKDVTQKNKEEGYTHIVEVTFESVETIQSYIIHPAHVGFGDVYRSFWEKLLIFDYTPRK

SEQ ID NO: 706 - protein, 101 aa, Artificial Sequence
  Synthetic
MAVKHLIVLKFKDEITNAQKEEFFKTYVTLLNIIPAMKQVYWGKDVTQKNKEEGYTHIVEVTFESVETIQSYIIHPAHVGFGAVYRSFWEKLLIFDYTPRK

SEQ ID NO: 707 - protein, 101 aa, Artificial Sequence
  Synthetic
MAVKHLIVLKFKDEITNDQKEEFFKTYVNLLNIIPAMKQVYWGKDVTQKNKEEGYTHIVEVTFESVETIQSYIIHPAHVGFGAVYRSFWEKLLIFDYTPRK

SEQ ID NO: 708 - protein, 101 aa, Artificial Sequence
  Synthetic
MAVKHLIVLKFKDEITEDQKEEFFKTYVTLLNIIPAMKQVYWGKDVTQKNKEEGYTHIVEVTFESVETIQSYIIHPAHVGFGAVYRSFWEKLLIFDYTPRK

SEQ ID NO: 709 - protein, 101 aa, Artificial Sequence
  Synthetic
MAVKHLIVLKFKDEITNDQKEEFFKTYVTLLNIIPAMKQVYWGKDVTQKNKEEGYTHIVEVTFESVETIQDYIIHPAHVGFGAVYRSFWEKLLIFDYTPRK

SEQ ID NO: 710 - protein, 101 aa, Artificial Sequence
  Synthetic
MAVKHLIVLKFKDEITNDQKEEFFKTYVTLVNIIPAMKQVYWGKDVTQKNKEEGYTHIVEVTFESVETIQSYIIHPAHVGFGAVYRSFWEKLLIFDYTPRK

SEQ ID NO: 711 - protein, 101 aa, Artificial Sequence
  Synthetic
MAVKHLIVLKFKDEITEAQKEEFFKTYVNLVNIIPAMKDVYWGKDVTQKNKEEGYTHIVEVTFESVETIQEYIIHPAHVGFGDVYRSFWEKLLIFDYTPRK

SEQ ID NO: 712 - protein, 101 aa, Artificial Sequence
  Synthetic
MAVKHLIVLKFKDEITEAQKEEFFKTYVNLVNIIPAMKDVYWGKDVTQKNKEEGYTHIVEVTFESVETIQEYIIHPAHVDFGDVYRSFWEKLLIFDYTPSK

SEQ ID NO: 713 - protein, 101 aa, Artificial Sequence
  Synthetic
MAVKHLIVLKFKDEITEAQKEEFFKTYVNLVNIIPAMKDVYWGKDVTQKNKEEGFTHIVEVTFESVETIQDYIIHPAHVAFGKVYRSFWEKLLIFDYTPRK

SEQ ID NO: 714 - protein, 101 aa, Artificial Sequence
  Synthetic
MAVKHLIVLKFKDEITEAQKEEFFKTYVNLVNIIPAMKDVYWGKDVTQKNKEEGYTHIVEVTFDSVETIQEYIIHPAHVGFGDVYRSFWEKLLIFDYTPRK

SEQ ID NO: 715 - protein, 101 aa, Artificial Sequence
  Synthetic
MAVKHLIVLKFKDEITEAQKEEFFKTYVNLVNIIPAMKDVYWGKDVTQKNKEEGYTHIVEVTFESYETIQDYIIHPAHVGFGDVYRSFWEKLLIFDYTPRK

SEQ ID NO: 716 - protein, 101 aa, Artificial Sequence
  Synthetic
MAVKHLIVLKFKDEITEAQKEEFFKTYVNLVNIIPAMKDVYWGKDVTQKNKEEGYTHIVEVTFESVETIQDYIIHPAHVGFGDVYRSFWEKLLIIDYTPRK

SEQ ID NO: 717 - protein, 101 aa, Artificial Sequence
  Synthetic
MAVKHLIVLKFKDEITEAQKEEFFKTYVNLVNIIPAMKDVYWGKDVTQKNKEEGYTHIVEVTFESVETIQDYIIHPAHVGFRDVYRSFWEKLLIFDYTPRK

SEQ ID NO: 718 - protein, 101 aa, Artificial Sequence
  Synthetic
MAVKHLIVLKFKDEITEAQKEEFFKTYVNLVNIIPAMKDVYWGKDVTQKNKEEGYTHIVEVTFESVETIQDYIIHPAHVGFGDVYRSFWEKLLIFDYTPRA

SEQ ID NO: 719 - protein, 101 aa, Artificial Sequence
  Synthetic
MAVKHLIVLKFKDEITEAQKEEFFKTYVNLVNIIPAMKDVYWGKDVTQKWKEEGYTHIVEVTFESVETIQDYIIHPAHVGFGDVYRSFWEKLLIFDYTPRK

SEQ ID NO: 720 - protein, 101 aa, Artificial Sequence
  Synthetic
MAVKHLIVLKFKDEITEAQKEEFFKTYVNLVNIIPAMKDVYWGKDVTAKNKEEGYTHIVEVTFESVETIQDYIIHPAHVGFGDVYRSFWEKLLIFDYTPRK

SEQ ID NO: 721 - protein, 101 aa, Artificial Sequence
  Synthetic
MAVKHLIVLKFKDEITEAQKEEFFKTYVNLVNIIPAMKDVYWGKDVTQKNKEEGYTHIVEVTFESVETIQDYIIHPAHVGFGDVYRSFWEKLLIFDYTPQK

SEQ ID NO: 722 - protein, 101 aa, Artificial Sequence
  Synthetic
MAVKHLIVLKFKDEITEAQKEEFFKTYVNLVNIIPAMKDVYWGKDVTQKNKEEGYTHIVEVTFESVETIQDYIIHPAHVGFGDVYRSFWEKLLIFDYTPSK

SEQ ID NO: 723 - protein, 101 aa, Artificial Sequence
  Synthetic
MAVKHLIVLKFKDEITEAQKEEFFKTYVNLVNIIPAMKDVYWGKDVTQKFKEEGYTHIVEVTFESVETIQDYIIHPAHVGFGDVYRSFWEKLLIFDYTPRK

SEQ ID NO: 724 - protein, 101 aa, Artificial Sequence
  Synthetic
MAVKHLIVLKFKDEITEAQKEEFFKTYVNLVNIIPAMKDVYWGKDVTQKNKEEGYTHIVEVTFESVETIQDYIIHPAHVGFGDVYRSFWEKLLIFDYEPRK

SEQ ID NO: 725 - protein, 101 aa, Artificial Sequence
  Synthetic
MAVKHLIVLKFKDEITEAQKEEFFKTYVNLVNIIPAMKDVYWGKDVTQKNKEEGYTHIVEVTFESVETIQDYIIHPAHVGFGDVYRSFWEKLLIFDYKPRK

SEQ ID NO: 726 - protein, 101 aa, Artificial Sequence
  Synthetic
MAVKHLIVLKFKDEITEAQKEEFFKTYVNLVNIIPAMKDVYWGKDVTQKNKEEGYTHIVEVTFESVETIQDYIIHPAHVGFGDVYRSFWEKLLIFDFTPRK

SEQ ID NO: 727 - protein, 101 aa, Artificial Sequence
  Synthetic
MAVKHLIVLKFKDEITEAQKEEFFKTYVNLVNIIPAMKDVYWGKDVTQKNKEEGYTHIVEVTFESVETIQDYIIHPAHVGFGDVYRSSWEKLLIFDYTPRK

SEQ ID NO: 728 - protein, 101 aa, Artificial Sequence
  Synthetic
MAVKHLIVLKFKDEITEAQKEEFFKTYVNLVNIIPAMKDVYWGKDVTQKNKEEGYTHIVEVTFESVETIQDYIIHPAHVGFGDVYRSFWEKLLIFDYTPGK

SEQ ID NO: 729 - protein, 101 aa, Artificial Sequence
  Synthetic
MAVKHLIVLKFKDEITEAQKEEFFKTYVNLVNIIPAMKDVYWGKDVTQKNKEEGYTHIVEVTFESVETIQDYIIHPAHVGFGDVYRSNWEKLLIFDYTPRK

SEQ ID NO: 730 - protein, 101 aa, Artificial Sequence
  Synthetic
MAVKHLIVLKFKDEITEAQKEEFFKTYVNLVNIIPAMKDVYWGKDVTQKNKEEGYTHIVEVTFESVETIQDYIIHPAHVGFGDVYRSFWEKLLIFDYTPAK

SEQ ID NO: 731 - protein, 101 aa, Artificial Sequence
  Synthetic
MAVKHLIVLKFKDEITEAQKEEFFKTYVNLVNIIPAMKDVYWGKDVTQKNKEEGYTHIVEVTFESVETIQDYIIHPAHVGFGDVYRSFWEKLLIFDYTPNK

SEQ ID NO: 732 - protein, 101 aa, Artificial Sequence
  Synthetic
MAVKHLIVLKFKDEITEAQKEEFFKTYVNLVNIIPAMKDVYWGKDVTQKNKEEGYTHIVEVTFESVETIQEYIIHPAHVGFGDVFRSFWEKLLIFDYTPRK

SEQ ID NO: 733 - protein, 101 aa, Artificial Sequence
  Synthetic
MAVKHLIVLKFKDEITEAQKEEFFKTYVNLVNIIPAMKDVYWGKDVTQKNKEEGYTHIFEVTFESVETIQDYIIHPAHVGFGDVYRSFWEKLLIFDYTPRK

SEQ ID NO: 734 - protein, 101 aa, Artificial Sequence
  Synthetic
MAVKHLIVLKFKDEITEAQKEEFFKTYVNLVNIIPAMKDVYWGKDVTQKNKEEGYTHIVEVTFESVETIQDYIIHPAHVNFGDVYRSFWEKLLIFDYTPRK

SEQ ID NO: 735 - protein, 101 aa, Artificial Sequence
  Synthetic
MAVKHLIVLKFKDEITEAQKEEFFKTYVNLVNIIPAMKDVYWGKDVTQKNKEEGYTHIVEVTFESVETIQDYIIHPAHVGFGDVFRSFWEKLLIFDYTPRK

SEQ ID NO: 736 - protein, 101 aa, Artificial Sequence
  Synthetic
MAVKHLIVLKFKDEITEAQKEEFFKTYVNLVNIIPAMKDVYWGKDVTQKNKEEGYTHIVEVTFENVETIQDYIIHPAHVGFGDVYRSFWEKLLIFDYTPRK

SEQ ID NO: 737 - protein, 101 aa, Artificial Sequence
  Synthetic
MAVKHLIVLKFKDEITEAQKEEFFKTYVNLVNIIPAMKDVYWGKDVTQKNKEEGYTHIVEVTFESVEGIQDYIIHPAHVGFGDVYRSFWEKLLIFDYTPRK

SEQ ID NO: 738 - protein, 101 aa, Artificial Sequence
  Synthetic
MAVKHLIVLKFKDEITEAQKEEFFKTYVNLVNIIPAMKDVYWGKDVTQKNKEEGYTHIVEDTFESVETIQDYIIHPAHVGFGDVYRSFWEKLLIFDYTPRK

SEQ ID NO: 739 - protein, 101 aa, Artificial Sequence
  Synthetic
MAVKHLIVLKFKDEITEAQKEEFFKTYVNLVNIIPAMKDVYWGKDVTQKNKEEGYTHIVEVTFDSVETIQEYIIHPAHVGFGDVYRSFWEKLLIFDYKPRK

SEQ ID NO: 740 - protein, 101 aa, Artificial Sequence
  Synthetic
MAVKHLIVLKFKDEITEAQKEEFFKTYVNLVNIIPAMKDVYWGKIVTQKNKEEGYTHIVEVTFESVETIQDYIIHPAHVGFGDVYRSFWEKLLIFDYTPRK

SEQ ID NO: 741 - protein, 101 aa, Artificial Sequence
  Synthetic
MAVKHLIVLKFKDEITEAQKEEFFKTYVNLVNIIPAMKDVYWGKDVTQKNKEEGYTHIVESTFESVETIQDYIIHPAHVGFGDVYRSFWEKLLIFDYTPRK

SEQ ID NO: 742 - protein, 101 aa, Artificial Sequence
  Synthetic
MAVKHLIVLKFKDEITEAQKEEFFKTYVNLVNIIPAMKDVYWGKDVTQKNKEEGYTHIVEVTFESVETIQDYIIHPAHVGFGDVYRSFWEKLLIFDYTPKK

SEQ ID NO: 743-744 - skipped (2 entries)

SEQ ID NO: 745 - protein, 101 aa, Artificial Sequence
  Synthetic
MAVKHLIVLKFKDEITEDQKEEFFKRYVNLVNRIPAMKGVYWGKDVTQKNKHEGFTHIVEVTFENVETIADYIIHPAHVAFGNKYRSFWEKLLIFDYTPRK

SEQ ID NO: 746 - protein, 101 aa, Artificial Sequence
  Synthetic
MAVKHLIVLKFKREITEAQKEEFFKRYVNLVNIIPAMKDVYWGKDVTQKNKEEGYTHIVEVTFDNVETIQDYIIHPAHVGFGEVYRSFWEKLLIFDYKPRK

SEQ ID NO: 747 - protein, 101 aa, Artificial Sequence
  Synthetic
MAVKHLIVLKFKDEITNDQKEEFFKTYVNLLNNIPAMKDVYWGKDVTQKNKEEGYTHIVEVTFESVETIQSYIIHPAHVAFGDFYRSFWEKLLIFDYTPRK

SEQ ID NO: 748 - protein, 101 aa, Artificial Sequence
  Synthetic
MAVKHLIVLKFKREITEDQKEEFFKTYVSLVNIIPAMKDVYWGKDVTQKNKEEGYTHIVEVTFESVETILQYIIHPAHVAFGEVYRSFWEKLLIFDYKPRK

SEQ ID NO: 749 - protein, 101 aa, Artificial Sequence
  Synthetic
MAVKHLIVLKFKDEITEDQKEEFFKRYVNLVNRIPAMKDVYWGKDVTQKNKHEGFTHIVEVTFESYETIADYIIHPAHVAFGNKFRSFWEKLLIFDYTPRK

SEQ ID NO: 750 - protein, 101 aa, Artificial Sequence
  Synthetic
MAVKHLIVLKFKREITEDQKEEFFKTYVSLVNIIPAMKDVYWGKDVTQKNKEEGYTHIVEVTFESVETILQYIIHPAHVAFGKVYRSFWEKLLIFDYYPRK

SEQ ID NO: 751 - protein, 101 aa, Artificial Sequence
  Synthetic
MAVKHLIVLKFKDEITNAQKEEFFKTYVNLLNNIPAMKDVYWGKDVTQKNKEEGYTHIVEVTFENVETIQSYIIHPAHVGFGDKYRSFWEKLLIFDYTPRK

SEQ ID NO: 752 - protein, 101 aa, Artificial Sequence
  Synthetic
MAVKHLIVLKFKDEITEDQKEKFFKRYVNLVNRIPAMKDVYWGKDVTQKNKHEGFTHIVEVTFESYETIADYIIHPAHVAFGNKYRSFWEKLLIFDYTPRK

SEQ ID NO: 753 - protein, 101 aa, Artificial Sequence
  Synthetic
MAVKHLIVLKFKREITEAQKEEFFKRYVNLVNIIPAMKGVYWGKDVTQKNKEEGYTHIVEVTFDSVETIQDYIIHPAHVGFGEVYRSFWEKLLIFDYKPRK

SEQ ID NO: 754 - protein, 101 aa, Artificial Sequence
  Synthetic
MAVKHLIVLKFKDEITEDQKEEFFKRYVNLVNRIPAMKDVYWGKDVTQKNKHEGFTHIVEVTFESVETIAEYIIHPAHVAFGNKYRSFWEKLLIFDYTPRK

SEQ ID NO: 755 - protein, 101 aa, Artificial Sequence
  Synthetic
MAVKHLIVLKFKDEITNDQKEEFFKTYVNLLNIIPAMKDVYWGKDVTQKNKEEGYTHIVEVTFESVETIQSYIIHPAHVGFGAKYRSFWEKLLIFDYTPRK

SEQ ID NO: 756 - protein, 101 aa, Artificial Sequence
  Synthetic
MAVKHLIVLKFKDEITEDQKEEFFKRYVNLVNRIPAMKDVYWGKDVTQKNKHEGFTHIVEVTFESYETIAEYIIHPAHVAFGNKYRSFWEKLLIFDYTPRK

SEQ ID NO: 757 - protein, 101 aa, Artificial Sequence
  Synthetic
MAVKHLIVLKFKDEITEDQKEEFFKRYVNLVNIIPAMKDVYWGKDVTQKNKHEGFTHIVEVTFESVETIADYIIHPAHVAFGNKFRSNWEKLLIFDYTPRK

SEQ ID NO: 758 - protein, 101 aa, Artificial Sequence
  Synthetic
MAVKHLIVLKFKDEITNDQKEEFFKTYVNLLNNIPAMKDVYWGKDVTQKNKEEGYTHIVEVTFESVETIQEYIIHPAHVGFGDFYRSFWEKLLIFDYTPRK

SEQ ID NO: 759 - protein, 101 aa, Artificial Sequence
  Synthetic
MAVKHLIVLKFKREITEAQKEEFFKRYVNLVNIIPAMKDVYWGKDVTQKNKEEGYTHIVEVTFDSVETIQDYIIHPAHVGFGEKYRSFWEKLLIFDYKPRK

SEQ ID NO: 760 - protein, 101 aa, Artificial Sequence; identical to SEQ ID NO: 255
  Synthetic

SEQ ID NO: 761 - protein, 101 aa, Artificial Sequence
  Synthetic
MAVKHLIVLKFKREITNAQKEEFFKTYVNLLNIIPAMKDVYWGKDVTQKNKEEGYTHIVEVTFESVETIQSYIIHPAHVGFGAKYRSFWEKLLIFDYTPRK

SEQ ID NO: 762 - protein, 101 aa, Artificial Sequence
  Synthetic
MAVKHLIVLKFKREITEDQKEEFFKTYVSLVNIIPAMKDVYWGKDVTQKNKEEGYTHIVEVTFESVETILQYIIHPAHVAFGEVYRSFWEKLLIFDYTPRK

SEQ ID NO: 763 - protein, 101 aa, Artificial Sequence
  Synthetic
MAVKHLIVLKFKREITNAQKEEFFKTYVNLLNNIPAMKDVYWGKDVTQKNKEEGYTHIVEVTFESVETIQSYIIHPAHVGFGDKYRSFWEKLLIFDYTPRK

SEQ ID NO: 764 - protein, 101 aa, Artificial Sequence
  Synthetic
MAVKHLIVLKFKDEITNAQKEEFFKRYVNLLNIIPAMKDVYWGKDVTQKNKEEGYTHIVEVTFESVETIQSYIIHPAHVGFGKFYRSFWEKLLIFDYTPRK

SEQ ID NO: 765 - protein, 101 aa, Artificial Sequence
  Synthetic
MAVKHLIVLKFKDEITNDQKEKFFKTYVNLLNNIPAMKDVYWGKDVTQKNKEEGYTHIVEVTFESVETIQEYIIHPAHVGFGDFYRSFWEKLLIFDYTPRK

SEQ ID NO: 766 - protein, 101 aa, Artificial Sequence
  Synthetic
MAVKHLIVLKFKDEITNDQKEEFFKTYVNLLNIIPAMKGVYWGKDVTQKNKEEGYTHIVEVTFESVETIQSYIIHPAHVGFGAKYRSFWEKLLIFDYTPRK

SEQ ID NO: 767 - protein, 101 aa, Artificial Sequence
  Synthetic
MAVKHLIVLKFKREITEDQKEEFFKTYVSLVNIIPAMKGVYWGKDVTQKNKEEGYTHIVEVTFESVETILQYIIHPAHVAFGKKYRSFWEKLLIFDYTPRK

SEQ ID NO: 768 - protein, 101 aa, Artificial Sequence
  Synthetic
MAVKHLIVLKFKDEITNAQKEKFFKTYVNLLNNIPAMKDVYWGKDVTQKNKEEGYTHIVEVTFESVETIQEYIIHPAHVGFGDFYRSFWEKLLIFDYTPRK

SEQ ID NO: 769 - protein, 101 aa, Artificial Sequence
  Synthetic
MAVKHLIVLKFKREITEDQKEEFFKTYVSLVNIIPAMKDVYWGKDVTQKNKEEGYTHIVEVTFENVETILQYIIHPAHVAFGKVYRSFWEKLLIFDYKPRK

SEQ ID NO: 770 - protein, 101 aa, Artificial Sequence
  Synthetic
MAVKHLIVLKFKREITEDQKEEFFKRYVNLVNIIPAMKGVYWGKDVTQKNKHEGFTHIVEVTFESVETIADYIIHPAHVAFGNKYRSFWEKLLIFDYTPRK

SEQ ID NO: 771 - protein, 101 aa, Artificial Sequence
  Synthetic
MAVKHLIVLKFKREITEDQKEEFFKTYVSLVNIIPAMKDVYWGKDVTQKNKEEGYTHIVEVTFDSVETILQYIIHPAHVAFGKVYRSFWEKLLIFDYTPRK

SEQ ID NO: 772 - protein, 101 aa, Artificial Sequence
  Synthetic
MAVKHLIVLKFKDEITEAQKEKFFKRYVNLVNHIPAMKDVYWGKDVTQKNKEEGFTHIVEVTFESVETIAEYIIHPAHVAFGKVYRSFWEKLLIFDYTPRK

SEQ ID NO: 773 - protein, 101 aa, Artificial Sequence
  Synthetic
MAVKHLIVLKFKREITEDQKEEFFKTYVSLVNIIPAMKDVYWGKDVTQKNKEEGYTHIVEVTFESVETILQYIGHPAHVAFGKVYRSFWEKLLIFDYKPRK

SEQ ID NO: 774 - protein, 101 aa, Artificial Sequence
  Synthetic
MAVKHLIVLKFKREITEDQKEEFFKTYVSLVNIIPAMKDVYWGKDVTQKNKEEGYTHIVEVTFDSVETILQYIIHPAHVAFGEVYRSFWEKLLIFDYTPRK

SEQ ID NO: 775 - protein, 101 aa, Artificial Sequence
  Synthetic
MAVKHLIVLKFKDEITNAQKEEFFKTYVNLLNIIPAMKDVYWGKDVTQKNKEEGYTHIVEVTFESVETIQSYIIHPAHVGFGAKYRSFWEKLLIFDYKPRK

SEQ ID NO: 776 - protein, 101 aa, Artificial Sequence
  Synthetic
MAVKHLIVLKFKDEITEDQKEEFFKRYVNLVNIIPAMKDVYWGKDVTQKNKHEGFTHIVEVTFESVETIADYIIHPAHVAFGKKFRSFWEKLLIFDYTPRK

SEQ ID NO: 777 - protein, 101 aa, Artificial Sequence
  Synthetic
MAVKHLIVLKFKDEITNAQKEEFFKTYVNLLNNIPAMKDVYWGKDVTQKNKEEGYTHIVEVTFESVETIQEYIIHPAHVGFRDFYRSFWEKLLIFDYTPRK

SEQ ID NO: 778 - protein, 101 aa, Artificial Sequence
  Synthetic
MAVKHLIVLKFKDEITNDQKEEFFKTYVNLLNIIPAMKDVYWGKDVTQKNKEEGYTHIVEVTFESVETIQSYIGHPAHVGFGAKYRSFWEKLLIFDYTPRK

SEQ ID NO: 779 - protein, 101 aa, Artificial Sequence
  Synthetic
MAVKHLIVLKFKREITEDQKEEFFKTYVSLVNIIPAMKDVYWGKDVTQKNKEEGYTHIVEVTFENVETILQYIGHPAHVAFGKVYRSFWEKLLIFDYTPRK

SEQ ID NO: 780 - protein, 101 aa, Artificial Sequence
  Synthetic
MAVKHLIVLKFKREITEDQKEEFFKTYVSLVNIIPAMKDVYWGKDVTQKNKEEGYTHIVEVTFESVETILDYIIHPAHVAFGEVYRSFWEKLLIFDYKPRK

SEQ ID NO: 781 - protein, 101 aa, Artificial Sequence
  Synthetic
MAVKHLIVLKFKREITNDQKEEFFKTYVNLLNIIPAMKDVYWGKDVTQKNKEEGYTHIVEVTFESVETIQSYIIHPAHVGFGEFYRSFWEKLLIFDYTPRK

SEQ ID NO: 782 - protein, 101 aa, Artificial Sequence
  Synthetic
MAVKHLIVLKFKREITEDQKEKFFKTYVSLVNIIPAMKDVYWGKDVTQKNKEEGYTHIVEVTFESVETILQYIIHPAHVAFGKVYRSFWEKLLIFDYTPRK

SEQ ID NO: 783 - protein, 101 aa, Artificial Sequence; identical to SEQ ID NO: 639
  Synthetic

SEQ ID NO: 784 - protein, 101 aa, Artificial Sequence
  Synthetic
MAVKHLIVLKFKREITEDQKEEFFKRYVSLVNIIPAMKDVYWGKDVTQKNKEEGYTHIVEVTFESVETILQYIIHPAHVAFGKVYRSFWEKLLIFDYKPRK

SEQ ID NO: 785 - protein, 101 aa, Artificial Sequence
  Synthetic
MAVKHLIVLKFKDEITNDQKEEFFKTYVNLLNNIPAMKDVYWGKDVTQKNKEEGYTHIVEVTFESVETIQSYIIHPAHVGFGDKYRSFWEKLLIFDYYPRK

SEQ ID NO: 786 - protein, 101 aa, Artificial Sequence
  Synthetic
MAVKHLIVLKFKREITEDQKEEFFKTYVSLVNIIPAMKDVYWGKDVTQKNKEEGYTHIVEVTFENVETILDYIGHPAHVAFGKVYRSFWEKLLIFDYTPRK

SEQ ID NO: 787 - protein, 101 aa, Artificial Sequence
  Synthetic
MAVKHLIVLKFKDEITEAQKEEFFKRYVNLVNHIPAMKDVYWGKDVTQKNKEEGFTHIVEVTFESVETIADYIGHPAHVAFGKVARSFWEKLLIFDYTPRK

SEQ ID NO: 788 - protein, 101 aa, Artificial Sequence; identical to SEQ ID NO: 349
  Synthetic

SEQ ID NO: 789 - protein, 101 aa, Artificial Sequence
  Synthetic
MAVKHLIVLKFKDEITNAQKEEFFKTYVNLLNNIPAMKGVYWGKDVTQKNKEEGYTHIVEVTFESVETIQSYIIHPAHVGFGDKYRSFWEKLLIFDYTPRK

SEQ ID NO: 790 - protein, 101 aa, Artificial Sequence
  Synthetic
MAVKHLIVLKFKDEITNDQKEEFFKTYVNLLNIIPAMKDVYWGKDVTQKNKEEGYTHIVEVTFESVETIQSYIGHPAHVGFGEFYRSFWEKLLIFDYTPRK

SEQ ID NO: 791 - protein, 101 aa, Artificial Sequence
  Synthetic
MAVKHLIVLKFKREITEAQKEEFFKRYVNLVNIIPAMKGVYWGKDVTQKNKEEGYTHIVEVTFENVETIQDYIIHPAHVGFGEKYRSFWEKLLIFDYTPRK

SEQ ID NO: 792 - protein, 101 aa, Artificial Sequence
  Synthetic
MAVKHLIVLKFKDEITEDQKEEFFKRYVNLVNIIPAMKGVYWGKDVTQKNKHEGFTHIVEVTFDSVETIADYIIHPAHVAFGNKYRSFWEKLLIFDYTPRK

SEQ ID NO: 793 - protein, 101 aa, Artificial Sequence
  Synthetic
MAVKHLIVLKFKREITEDQKEEFFKRYVSLVNIIPAMKDVYWGKDVTQKNKEEGYTHIVEVTFDSVETILQYIIHPAHVAFGKVYRSFWEKLLIFDYTPRK

SEQ ID NO: 794 - protein, 101 aa, Artificial Sequence
  Synthetic
MAVKHLIVLKFKDEITEAQKEEFFKRYVNLVNHIPAMKDVYWGKDVTQKNKEEGFTHIVEVTFESVETIADYIIHPAHVAFGEVYRSFWEKLLIFDYKPRK

SEQ ID NO: 795 - protein, 101 aa, Artificial Sequence
  Synthetic
MAVKHLIVLKFKDEITEDQKEEFFKRYVNLVNRIPAMKDVYWGKDVTQKNKHEGFTHIVEVTFENVETIADYIIHPAHVAFGEKYRSFWEKLLIFDYTPRK

SEQ ID NO: 796 - protein, 101 aa, Artificial Sequence; identical to SEQ ID NO: 294
  Synthetic

SEQ ID NO: 797 - protein, 101 aa, Artificial Sequence
  Synthetic
MAVKHLIVLKFKDEITEDQKEEFFKRYVNLVNIIPAMKDVYWGKDVTQKNKHEGFTHIVEVTFESVETIADYIIHPAHVAFGNKYRSNWEKLLIFDYKPRK

SEQ ID NO: 798 - protein, 101 aa, Artificial Sequence
  Synthetic
MAVKHLIVLKFKDEITNDQKEKFFKTYVNLLNIIPAMKDVYWGKDVTQKNKEEGYTHIVEVTFESVETIQEYIIHPAHVGFGAFYRSFWEKLLIFDYTPRK

SEQ ID NO: 799 - protein, 101 aa, Artificial Sequence
  Synthetic
MAVKHLIVLKFKDEITNDQKEEFFKTYVNLLNIIPAMKDVYWGKDVTQKNKEEGYTHIVEVTFESVETIQSYIIHPAHVGFGEFYRSFWEKLLIFDYKPRK

SEQ ID NO: 800 - protein, 101 aa, Artificial Sequence
  Synthetic
MAVKHLIVLKFKREITEDQKEEFFKRYVSLVNIIPAMKDVYWGKDVTQKNKEEGYTHIVEVTFESVETILQYIIHPAHVAFGEVYRSFWEKLLIFDYTPRK

SEQ ID NO: 801 - protein, 101 aa, Artificial Sequence
  Synthetic
MAVKHLIVLKFKDEITEAQKEEFFKRYVNLVNHIPAMKDVYWGKDVTQKNKEEGFTHIVEVTFESVETIADYIIHPAHVAFGEVYRSNWEKLLIFDYTPRK

SEQ ID NO: 802 - protein, 101 aa, Artificial Sequence
  Synthetic
MAVKHLIVLKFKREITEDQKEEFFKTYVSLVNIIPAMKDVYWGKDVTQKNKEEGYTHIVEVTFESVETILQYIIHPAHVAFGEVYRSFWEKLLIFDYYPRK

SEQ ID NO: 803 - protein, 101 aa, Artificial Sequence
  Synthetic
MAVKHLIVLKFKREITEDQKEEFFKTYVSLVNIIPAMKDVYWGKDVTQKNKEEGYTHIVEVTFESVETILQYIIHPAHVAFGKKFRSFWEKLLIFDYTPRK

SEQ ID NO: 804 - protein, 101 aa, Artificial Sequence
  Synthetic
MAVKHLIVLKFKREITEDQKEEFFKRYVSLVNIIPAMKDVYWGKDVTQKNKEEGYTHIVEVTFESVETILQYIIHPAHVAFGKVYRSFWEKLLIFDYTPRK

SEQ ID NO: 805 - protein, 101 aa, Artificial Sequence
  Synthetic
MAVKHLIVLKFKDEITEDQKEEFFKRYVNLVNIIPAMKGVYWGKDVTQKNKHEGFTHIVEVTFESVETIADYIIHPAHVAFGNKYRSFWEKLLIFDYKPRK

SEQ ID NO: 806 - protein, 101 aa, Artificial Sequence
  Synthetic
MAVKHLIVLKFKDEITNAQKEEFFKTYVNLLNIIPAMKDVYWGKDVTQKNKEEGYTHIVEVTFESVETIQSYIIHPAHVGFGKFYRSFWEKLLIFDYYPRK

SEQ ID NO: 807 - protein, 101 aa, Artificial Sequence
  Synthetic
MAVKHLIVLKFKDEITNDQKEEFFKTYVNLLNIIPAMKDVYWGKDVTQKNKEEGYTHIVEVTFDSVETIQSYIGHPAHVGFGAFYRSFWEKLLIFDYTPRK

SEQ ID NO: 808 - protein, 101 aa, Artificial Sequence
  Synthetic
MAVKHLIVLKFKDEITEAQKEEFFKRYVNLVNIIPAMKGVYWGKDVTQKNKEEGYTHIVEVTFENVETIQDYIIHPAHVGFGEKYRSFWEKLLIFDYKPRK

SEQ ID NO: 809 - protein, 101 aa, Artificial Sequence
  Synthetic
MAVKHLIVLKFKDEITNAQKEEFFKTYVNLLNNIPAMKDVYWGKDVTQKNKEEGYTHIVEVTFESVETIQSYIIHPAHVGFGDKYRSFWEKLLIFDYKPRK

SEQ ID NO: 810 - protein, 101 aa, Artificial Sequence
  Synthetic
MAVKHLIVLKFKDEITNAQKEEFFKTYVNLLNIIPAMKDVYWGKDVTQKNKEEGYTHIVEVTFESVETIQSYIIHPAHVGFGEFYRSFWEKLLIFDYYPRK

SEQ ID NO: 811 - protein, 101 aa, Artificial Sequence
  Synthetic
MAVKHLIVLKFKREITEDQKEEFFKRYVNLVNIIPAMKDVYWGKDVTQKNKHEGFTHIVEVTFESVETIADYIIHPAHVAFGNKYRSFWEKLLIFDYTPRK

SEQ ID NO: 812 - protein, 101 aa, Artificial Sequence
  Synthetic
MAVKHLIVLKFKDEITEDQKEEFFKRYVNLVNNIPAMKDVYWGKDVTQKNKHEGFTHIVEVTFESVETIASYIIHPAHVAFGNKYRSFWEKLLIFDYTPRK

SEQ ID NO: 813 - protein, 101 aa, Artificial Sequence
  Synthetic
MAVKHLIVLKFKREITEDQKEEFFKTYVSLVNIIPAMKDVYWGKDVTQKNKEEGYTHIVEVTFDNVETILQYIIHPAHVAFGKVYRSFWEKLLIFDYTPRK

SEQ ID NO: 814 - protein, 101 aa, Artificial Sequence
  Synthetic
MAVKHLIVLKFKDEITNDQKEEFFKTYVNLLNIIPAMKDVYWGKDVTQKNKEEGYTHIVEVTFESYETIQSYIIHPAHVGFGAFFRSFWEKLLIFDYTPRK

SEQ ID NO: 815 - protein, 101 aa, Artificial Sequence
  Synthetic
MAVKHLIVLKFKREITNDQKEEFFKTYVNLLNIIPAMKDVYWGKDVTQKNKEEGYTHIVEVTFESVETIQSYIIHPAHVGFGKFYRSFWEKLLIFDYTPRK

SEQ ID NO: 816 - protein, 101 aa, Artificial Sequence
  Synthetic
MAVKHLIVLKFKDEITEDQKEEFFKRYVNLVNIIPAMKDVYWGKDVTQKNKHEGFTHIVEVTFDSVETIADYIGHPAHVAFGNKYRSFWEKLLIFDYTPRK

SEQ ID NO: 817 - protein, 101 aa, Artificial Sequence
  Synthetic
MAVKHLIVLKFKDEITNAQKEEFFKTYVNLLNIIPAMKDVYWGKDVTQKNKEEGYTHIVEVTFESVETIQSYIIHPAHVGFGKFYRSFWEKLLIFDYKPRK

SEQ ID NO: 818 - protein, 101 aa, Artificial Sequence
  Synthetic
MAVKHLIVLKFKDEITEAQKEEFFKRYVNLVNIIPAMKGVYWGKDVTQKNKEEGYTHIVEVTFDNVETIQDYIIHPAHVGFGEVYRSFWEKLLIFDYKPRK

SEQ ID NO: 819 - protein, 101 aa, Artificial Sequence
  Synthetic
MAVKHLIVLKFKREITEDQKEKFFKTYVSLVNIIPAMKDVYWGKDVTQKNKEEGYTHIVEVTFESVETILEYIIHPAHVAFGKVYRSFWEKLLIFDYTPRK

SEQ ID NO: 820 - protein, 101 aa, Artificial Sequence; identical to SEQ ID NO: 349
  Synthetic

SEQ ID NO: 821 - protein, 101 aa, Artificial Sequence
  Synthetic
MAVKHLIVLKFKDEITEAQKEEFFKRYVNLVNHIPAMKDVYWGKDVTQKNKEEGFTHIVEVTFESVETIADYIIHPAHVAFGEKARSFWEKLLIFDYTPRK

SEQ ID NO: 822 - protein, 101 aa, Artificial Sequence
  Synthetic
MAVKHLIVLKFKDEITNAQKEEFFKRYVNLLNIIPAMKDVYWGKDVTQKNKEEGYTHIVEVTFESVETIQSYIIHPAHVGFGEFYRSFWEKLLIFDYTPRK

SEQ ID NO: 823 - protein, 101 aa, Artificial Sequence
  Synthetic
MAVKHLIVLKFKDEITEAQKEEFFKRYVNLVNHIPAMKDVYWGKDVTQKNKEEGFTHIVEVTFESVETIADYIIHPAHVAFGKKYRSNWEKLLIFDYTPRK

SEQ ID NO: 824 - protein, 101 aa, Artificial Sequence
  Synthetic
MAVKHLIVLKFKREITEAQKEEFFKTYVNLVNIIPAMKGVYWGKDVTQKNKEEGYTHIVEVTFDNVETIQDYIIHPAHVGFGDKYRSFWEKLLIFDYKPRK

SEQ ID NO: 825 - protein, 101 aa, Artificial Sequence
  Synthetic
MAVKHLIVLKFKREITEAQKEEFFKRYVNLVNIIPAMKGVYWGKDVTQKNKEEGYTHIVEVTFENVETIQDYIIHPAHVGFGEVYRSFWEKLLIFDYKPRK

SEQ ID NO: 826 - protein, 101 aa, Artificial Sequence
  Synthetic
MAVKHLIVLKFKREITEDQKEEFFKTYVSLVNIIPAMKDVYWGKDVTQKNKEEGYTHIVEVTFENVETILQYIIHPAHVAFGKKYRSFWEKLLIFDYTPRK

SEQ ID NO: 827 - protein, 101 aa, Artificial Sequence
  Synthetic
MAVKHLIVLKFKREITEAQKEEFFKRYVNLVNIIPAMKGVYWGKDVTQKNKEEGYTHIVEVTFDNVETIQDYIIHPAHVGFGDKYRSFWEKLLIFDYTPRK

SEQ ID NO: 828 - protein, 101 aa, Artificial Sequence
  Synthetic
MAVKHLIVLKFKREITEAQKEEFFKRYVNLVNIIPAMKGVYWGKDVTQKNKEEGYTHIVEVTFENVETIQDYIIHPAHVGFGDKYRSFWEKLLIFDYKPRK

SEQ ID NO: 829 - protein, 101 aa, Artificial Sequence
  Synthetic
MAVKHLIVLKFKDEITNAQKEEFFKTYVNLLNIIPAMKDVYWGKDVTQKNKEEGYTHIVEVTFESVETIQSYIIHPAHVGFGAFYRSFWEKLLIFDYYPRK

SEQ ID NO: 830 - protein, 101 aa, Artificial Sequence; identical to SEQ ID NO: 344
  Synthetic

SEQ ID NO: 831 - protein, 101 aa, Artificial Sequence
  Synthetic
MAVKHLIVLKFKREITEDQKEEFFKRYVNLVNIIPAMKDVYWGKDVTQKNKHEGFTHIVEVTFENVETIADYIIHPAHVAFGNKYRSFWEKLLIFDYTPRK

SEQ ID NO: 832 - protein, 101 aa, Artificial Sequence
  Synthetic
MAVKHLIVLKFKDEITEAQKEEFFKRYVNLVNNIPAMKDVYWGKDVTQKNKEEGFTHIVEVTFESVETIASYIIHPAHVAFGKVYRSFWEKLLIFDYTPRK

SEQ ID NO: 833 - protein, 101 aa, Artificial Sequence
  Synthetic
MAVKHLIVLKFKDEITEDQKEKFFKRYVNLVNIIPAMKDVYWGKDVTQKNKHEGFTHIVEVTFESVETIAEYIIHPAHVAFGNKYRSFWEKLLIFDYTPRK

SEQ ID NO: 834 - protein, 101 aa, Artificial Sequence
  Synthetic
MAVKHLIVLKFKDEITNDQKEEFFKTYVNLLNIIPAMKDVYWGKDVTQKNKEEGYTHIVEVTFESVETIQSYIIHPAHVGFGKFYRSFWEKLLIFDYYPRK

SEQ ID NO: 835 - protein, 101 aa, Artificial Sequence
  Synthetic
MAVKHLIVLKFKDEITNAQKEEFFKTYVNLLNNIPAMKDVYWGKDVTQKNKEEGYTHIVEVTFESYETIQSYIIHPAHVGFGDFYRSFWEKLLIFDYTPRK

SEQ ID NO: 836 - protein, 101 aa, Artificial Sequence
  Synthetic
MAVKHLIVLKFKREITEAQKEEFFKTYVNLVNIIPAMKGVYWGKDVTQKNKEEGYTHIVEVTFDNVETIQDYIIHPAHVGFGEVYRSFWEKLLIFDYKPRK

SEQ ID NO: 837 - protein, 101 aa, Artificial Sequence
  Synthetic
MAVKHLIVLKFKREITEDQKEEFFKRYVNLVNRIPAMKDVYWGKDVTQKNKHEGFTHIVEVTFESVETIADYIIHPAHVAFGNKFRSFWEKLLIFDYTPRK

SEQ ID NO: 838 - protein, 101 aa, Artificial Sequence
  Synthetic
MAVKHLIVLKFKDEITNAQKEEFFKTYVNLLNNIPAMKDVYWGKDVTQKNKEEGYTHIVEVTFDSVETIQSYIIHPAHVGFGDKYRSFWEKLLIFDYTPRK

SEQ ID NO: 839 - protein, 101 aa, Artificial Sequence
  Synthetic
MAVKHLIVLKFKDEITEAQKEEFFKRYVNLVNHIPAMKDVYWGKDVTQKNKEEGFTHIVEVTFDSVETIADYIIHPAHVAFGEVARSFWEKLLIFDYTPRK

SEQ ID NO: 840 - protein, 101 aa, Artificial Sequence
  Synthetic
MAVKHLIVLKFKDEITNDQKEEFFKTYVNLLNNIPAMKDVYWGKDVTQKNKEEGYTHIVEVTFESVETIQSYIIHPAHVGFGKKYRSFWEKLLIFDYTPRK

SEQ ID NO: 841 - protein, 101 aa, Artificial Sequence
  Synthetic
MAVKHLIVLKFKREITEAQKEEFFKRYVNLVNIIPAMKGVYWGKDVTQKNKEEGYTHIVEVTFDSVETIQDYIIHPAHVGFGDKYRSFWEKLLIFDYKPRK

SEQ ID NO: 842 - protein, 101 aa, Artificial Sequence
  Synthetic
MAVKHLIVLKFKDEITNAQKEEFFKTYVNLLNIIPAMKDVYWGKDVTQKNKEEGYTHIVEVTFESVETIQSYIGHPAHVGFGKFYRSFWEKLLIFDYTPRK

SEQ ID NO: 843 - protein, 101 aa, Artificial Sequence
  Synthetic
MAVKHLIVLKFKDEITNDQKEEFFKTYVNLLNIIPAMKDVYWGKDVTQKNKEEGYTHIVEVTFESVETIQSYIIHPAHVGFGEFYRSFWEKLLIFDYYPRK

SEQ ID NO: 844 - protein, 101 aa, Artificial Sequence
  Synthetic
MAVKHLIVLKFKREITEDQKEEFFKTYVSLVNIIPAMKDVYWGKDVTQKNKEEGYTHIVEVTFESVETILEYIIHPAHVAFGKVYRSFWEKLLIFDYTPRK

SEQ ID NO: 845 - protein, 101 aa, Artificial Sequence
  Synthetic
MAVKHLIVLKFKDEITNAQKEEFFKTYVNLLNNIPAMKDVYWGKDVTQKNKEEGYTHIVEVTFESVETIQSYIIHPAHVGFGKKYRSFWEKLLIFDYTPRK

SEQ ID NO: 846 - protein, 101 aa, Artificial Sequence
  Synthetic
MAVKHLIVLKFKDEITNDQKEEFFKTYVNLLNIIPAMKDVYWGKDVTQKNKEEGYTHIVEVTFESVETIQEYIIHPAHVGFGAFYRSFWEKLLIFDYTPRK

SEQ ID NO: 847 - protein, 101 aa, Artificial Sequence
  Synthetic
MAVKHLIVLKFKREITEDQKEEFFKRYVNLVNIIPAMKDVYWGKDVTQKNKHEGFTHIVEVTFESVETIADYIIHPAHVAFGNKYRSFWEKLLIFDYYPRK

SEQ ID NO: 848 - protein, 101 aa, Artificial Sequence
  Synthetic
MAVKHLIVLKFKDEITNDQKEEFFKTYVNLLNIIPAMKDVYWGKDVTQKNKEEGYTHIVEVTFENVETIQSYIIHPAHVGFGAKYRSFWEKLLIFDYTPRK

SEQ ID NO: 849 - protein, 101 aa, Artificial Sequence
  Synthetic
MAVKHLIVLKFKDEITEDQKEEFFKRYVNLVNIIPAMKGVYWGKDVTQKNKHEGFTHIVEVTFESVETIADYIGHPAHVAFGNKYRSFWEKLLIFDYTPRK

SEQ ID NO: 850 - protein, 101 aa, Artificial Sequence
  Synthetic
MAVKHLIVLKFKDEITNAQKEEFFKTYVNLLNIIPAMKGVYWGKDVTQKNKEEGYTHIVEVTFESVETIQSYIIHPAHVGFGAKYRSFWEKLLIFDYTPRK

SEQ ID NO: 851 - protein, 101 aa, Artificial Sequence
  Synthetic
MAVKHLIVLKFKREITEDQKEEFFKRYVNLVNIIPAMKDVYWGKDVTQKNKHEGFTHIVEVTFESVETIADYIIHPAHVAFGNKFRSFWEKLLIFDYTPRK

SEQ ID NO: 852 - protein, 101 aa, Artificial Sequence
  Synthetic
MAVKHLIVLKFKDEITEAQKEEFFKRYVNLVNHIPAMKDVYWGKDVTQKNKEEGFTHIVEVTFDSVETIADYIIHPAHVAFGKKYRSFWEKLLIFDYTPRK

SEQ ID NO: 853 - protein, 101 aa, Artificial Sequence
  Synthetic
MAVKHLIVLKFKDEITNAQKEEFFKTYVNLLNNIPAMKDVYWGKDVTQKNKEEGYTHIVEVTFESVETIQSYIIHPAHVGFGDKYRSFWEKLLIFDYYPRK

SEQ ID NO: 854 - protein, 101 aa, Artificial Sequence
  Synthetic
MAVKHLIVLKFKREITEDQKEEFFKTYVSLVNIIPAMKDVYWGKDVTQKNKEEGYTHIVEVTFDSVETILQYIIHPAHVAFGKKYRSFWEKLLIFDYTPRK

SEQ ID NO: 855 - protein, 101 aa, Artificial Sequence
  Synthetic
MAVKHLIVLKFKDEITNAQKEEFFKTYVNLLNIIPAMKDVYWGKDVTQKNKEEGYTHIVEVTFENVETIQSYIIHPAHVGFGAKYRSFWEKLLIFDYTPRK

SEQ ID NO: 856 - protein, 101 aa, Artificial Sequence
  Synthetic
MAVKHLIVLKFKDEITNAQKEEFFKRYVNLLNNIPAMKDVYWGKDVTQKNKEEGYTHIVEVTFDSVETIQSYIIHPAHVGFGDFYRSFWEKLLIFDYTPRK

SEQ ID NO: 857 - protein, 101 aa, Artificial Sequence
  Synthetic
MAVKHLIVLKFKDEITNDQKEEFFKTYVNLLNNIPAMKDVYWGKDVTQKNKEEGYTHIVEVTFESVETIQSYIIHPAHVGFGEKYRSFWEKLLIFDYTPRK

SEQ ID NO: 858 - protein, 101 aa, Artificial Sequence
  Synthetic
MAVKHLIVLKFKREITNDQKEEFFKTYVNLLNIIPAMKDVYWGKDVTQKNKEEGYTHIVEVTFESVETIQSYIIHPAHVGFGAKYRSFWEKLLIFDYTPRK

SEQ ID NO: 859 - protein, 101 aa, Artificial Sequence
  Synthetic
MAVKHLIVLKFKDEITEDQKEEFFKRYVNLVNIIPAMKDVYWGKDVTQKNKHEGFTHIVEVTFENVETIADYIIHPAHVAFGNKYRSFWEKLLIFDYYPRK

SEQ ID NO: 860 - protein, 101 aa, Artificial Sequence
  Synthetic
MAVKHLIVLKFKDEITEDQKEKFFKRYVNLVNIIPAMKDVYWGKDVTQKNKHEGFTHIVEVTFESVETIADYIIHPAHVAFGNKYRSFWEKLLIFDYTPRK

SEQ ID NO: 861 - protein, 101 aa, Artificial Sequence
  Synthetic
MAVKHLIVLKFKDEITEDQKEEFFKRYVNLVNIIPAMKDVYWGKDVTQKNKHEGFTHIVEVTFDSVETIADYIIHPAHVAFGNKYRSFWEKLLIFDYKPRK

SEQ ID NO: 862 - protein, 101 aa, Artificial Sequence
  Synthetic
MAVKHLIVLKFKDEITEDQKEEFFKRYVNLVNRIPAMKGVYWGKDVTQKNKHEGFTHIVEVTFDSVETIADYIIHPAHVAFGNKYRSFWEKLLIFDYTPRK

SEQ ID NO: 863 - protein, 101 aa, Artificial Sequence
  Synthetic
MAVKHLIVLKFKDEITEDQKEEFFKRYVNLVNIIPAMKDVYWGKDVTQKNKHEGFTHIVEVTFESVETIADYIIHPAHVAFGNKFRSFWEKLLIFDYTPRK

SEQ ID NO: 864 - protein, 101 aa, Artificial Sequence
  Synthetic
MAVKHLIVLKFKDEITEDQKEEFFKRYVNLVNIIPAMKDVYWGKDVTQKNKHEGFTHIVEVTFESVETIADYIIHPAHVAFGEKYRSFWEKLLIFDYYPRK

SEQ ID NO: 865 - protein, 101 aa, Artificial Sequence
  Synthetic
MAVKHLIVLKFKDEITNDQKEEFFKRYVNLLNNIPAMKDVYWGKDVTQKNKEEGYTHIVEVTFESVETIQSYIIHPAHVGFGDKYRSFWEKLLIFDYTPRK

SEQ ID NO: 866 - protein, 101 aa, Artificial Sequence; identical to SEQ ID NO: 284
  Synthetic

SEQ ID NO: 867 - protein, 101 aa, Artificial Sequence
  Synthetic
MAVKHLIVLKFKDEITEAQKEEFFKRYVNLVNHIPAMKDVYWGKDVTQKNKEEGFTHIVEVTFDSVETIADYIIHPAHVAFGKVARSFWEKLLIFDYTPRK

SEQ ID NO: 868 - protein, 101 aa, Artificial Sequence
  Synthetic
MAVKHLIVLKFKREITEDQKEEFFKTYVSLVNIIPAMKDVYWGKDVTQKNKEEGYTHIVEVTFESYETILDYIIHPAHVAFGKVFRSFWEKLLIFDYTPRK

SEQ ID NO: 869 - protein, 101 aa, Artificial Sequence
  Synthetic
MAVKHLIVLKFKREITEAQKEEFFKTYVNLVNIIPAMKGVYWGKDVTQKNKEEGYTHIVEVTFDSVETIQDYIIHPAHVGFGEKYRSFWEKLLIFDYKPRK

SEQ ID NO: 870 - protein, 101 aa, Artificial Sequence
  Synthetic
MAVKHLIVLKFKDEITEDQKEEFFKRYVNLVNIIPAMKDVYWGKDVTQKNKHEGFTHIVEVTFESVETIADYIIHPAHVAFGNKYRSFWEKLLIFDYTPRK

SEQ ID NO: 871 - protein, 101 aa, Artificial Sequence
  Synthetic
MAVKHLIVLKFKDEITNAQKEEFFKTYVNLLNNIPAMKDVYWGKDVTQKNKEEGYTHIVEVTFESVETIQSYIIHPAHVGFRDFYRSFWEKLLIFDYTPRK

SEQ ID NO: 872 - protein, 101 aa, Artificial Sequence
  Synthetic
MAVKHLIVLKFKREITEDQKEEFFKTYVSLVNIIPAMKDVYWGKDVTQKNKEEGYTHIVEVTFESVETILDYIGHPAHVAFGKVFRSFWEKLLIFDYTPRK

SEQ ID NO: 873 - protein, 101 aa, Artificial Sequence; identical to SEQ ID NO: 284
  Synthetic

SEQ ID NO: 874 - protein, 101 aa, Artificial Sequence
  Synthetic
MAVKHLIVLKFKDEITEDQKEEFFKRYVNLVNRIPAMKDVYWGKDVTQKNKHEGFTHIVEVTFENVETIADYIIHPAHVAFGNKYRSFWEKLLIFDYYPRK

SEQ ID NO: 875 - protein, 101 aa, Artificial Sequence
  Synthetic
MAVKHLIVLKFKDEITNDQKEEFFKTYVNLLNNIPAMKDVYWGKDVTQKNKEEGYTHIVEVTFESVETIQSYIIHPAHVGFGDKYRSFWEKLLIFDYKPRK

SEQ ID NO: 876 - protein, 101 aa, Artificial Sequence
  Synthetic
MAVKHLIVLKFKREITEDQKEEFFKTYVSLVNIIPAMKDVYWGKDVTQKNKEEGYTHIVEVTFESVETILDYIIHPAHVAFGKVYRSFWEKLLIFDYTPRK

SEQ ID NO: 877 - protein, 101 aa, Artificial Sequence
  Synthetic
MAVKHLIVLKFKREITEDQKEEFFKTYVSLVNIIPAMKDVYWGKDVTQKNKEEGYTHIVEVTFESVETILQYIIHPAHVAFGKKYRSFWEKLLIFDYYPRK

SEQ ID NO: 878 - protein, 101 aa, Artificial Sequence
  Synthetic
MAVKHLIVLKFKREITEDQKEKFFKTYVSLVNIIPAMKDVYWGKDVTQKNKEEGYTHIVEVTFESYETILDYIIHPAHVAFGKVYRSFWEKLLIFDYTPRK

SEQ ID NO: 879 - protein, 101 aa, Artificial Sequence
  Synthetic
MAVKHLIVLKFKDEITNDQKEEFFKTYVNLLNIIPAMKDVYWGKDVTQKNKEEGYTHIVEVTFESVETIQSYIIHPAHVGFGKFYRSFWEKLLIFDYTPRK

SEQ ID NO: 880 - protein, 101 aa, Artificial Sequence
  Synthetic
MAVKHLIVLKFKDEITNAQKEEFFKTYVNLLNIIPAMKDVYWGKDVTQKNKEEGYTHIVEVTFESVETIQSYIIHPAHVGFGEFYRSFWEKLLIFDYKPRK

SEQ ID NO: 881 - protein, 101 aa, Artificial Sequence
  Synthetic
MAVKHLIVLKFKDEITNDQKEEFFKTYVNLLNNIPAMKDVYWGKDVTQKNKEEGYTHIVEVTFESVETIQSYIGHPAHVGFGDKYRSFWEKLLIFDYTPRK

SEQ ID NO: 882 - protein, 101 aa, Artificial Sequence
  Synthetic
MAVKHLIVLKFKREITEAQKEEFFKRYVNLVNIIPAMKDVYWGKDVTQKNKEEGYTHIVEVTFDNVETIQDYIIHPAHVGFGDKYRSFWEKLLIFDYKPRK

SEQ ID NO: 883 - protein, 101 aa, Artificial Sequence
  Synthetic
MAVKHLIVLKFKDEITEDQKEEFFKRYVNLVNIIPAMKDVYWGKDVTQKNKHEGFTHIVEVTFESVETIAEYIIHPAHVAFGNKYRSFWEKLLIFDYTPRK

SEQ ID NO: 884 - protein, 101 aa, Artificial Sequence
  Synthetic
MAVKHLIVLKFKDEITNDQKEEFFKTYVNLLNIIPAMKDVYWGKDVTQKNKEEGYTHIVEVTFESYETIQEYIIHPAHVGFGAFYRSFWEKLLIFDYTPRK

SEQ ID NO: 885 - protein, 101 aa, Artificial Sequence
  Synthetic
MAVKHLIVLKFKREITEAQKEEFFKTYVNLVNIIPAMKGVYWGKDVTQKNKEEGYTHIVEVTFENVETIQDYIIHPAHVGFGEKYRSFWEKLLIFDYKPRK

SEQ ID NO: 886 - protein, 101 aa, Artificial Sequence
  Synthetic
MAVKHLIVLKFKREITEAQKEKFFKTYVNLVNIIPAMKDVYWGKDVTQKNKEEGYTHIVEVTFESYETIQEYIIHPAHVGFGKVYRSFWEKLLIFDYKPRK

SEQ ID NO: 887 - protein, 101 aa, Artificial Sequence
  Synthetic
MAVKHLIVLKFKDEITNAQKEEFFKTYVNLLNNIPAMKDVYWGKDVTQKNKEEGYTHIVEVTFDSVETIQSYIIHPAHVGFGDFYRSFWEKLLIFDYYPRK

SEQ ID NO: 888 - protein, 101 aa, Artificial Sequence
  Synthetic
MAVKHLIVLKFKDEITNDQKEEFFKTYVNLLNNIPAMKDVYWGKDVTQKNKEEGYTHIVEVTFDSVETIQSYIIHPAHVGFGDKYRSFWEKLLIFDYTPRK

SEQ ID NO: 889 - protein, 101 aa, Artificial Sequence
  Synthetic
MAVKHLIVLKFKDEITNDQKEEFFKTYVNLLNNIPAMKGVYWGKDVTQKNKEEGYTHIVEVTFESVETIQSYIIHPAHVGFGDKYRSFWEKLLIFDYTPRK

SEQ ID NO: 890 - protein, 101 aa, Artificial Sequence; identical to SEQ ID NO: 227
  Synthetic

SEQ ID NO: 891 - protein, 101 aa, Artificial Sequence
  Synthetic
MAVKHLIVLKFKREITEAQKEEFFKTYVNLVNIIPAMKDVYWGKDVTQKNKEEGYTHIVEVTFDNVETIQDYIIHPAHVGFGEKYRSFWEKLLIFDYKPRK

SEQ ID NO: 892 - protein, 101 aa, Artificial Sequence; identical to SEQ ID NO: 344
  Synthetic

SEQ ID NO: 893 - protein, 101 aa, Artificial Sequence
  Synthetic
MAVKHLIVLKFKDEITNAQKEEFFKTYVNLLNIIPAMKDVYWGKDVTQKNKEEGYTHIVEVTFESYETIQSYIIHPAHVGFGAFFRSFWEKLLIFDYTPRK

SEQ ID NO: 894 - protein, 101 aa, Artificial Sequence
  Synthetic
MAVKHLIVLKFKDEITEAQKEEFFKRYVNLVNHIPAMKDVYWGKDVTQKNKEEGFTHIVEVTFESVETIADYIIHPAHVAFGKVYRSFWEKLLIFDYTPRK

SEQ ID NO: 895 - protein, 101 aa, Artificial Sequence
  Synthetic
MAVKHLIVLKFKDEITNDQKEEFFKTYVNLLNIIPAMKDVYWGKDVTQKNKEEGYTHIVEVTFDSVETIQSYIIHPAHVGFGAFYRSFWEKLLIFDYKPRK

SEQ ID NO: 896 - protein, 101 aa, Artificial Sequence
  Synthetic
MAVKHLIVLKFKREITEDQKEEFFKTYVSLVNIIPAMKDVYWGKDVTQKNKEEGYTHIVEVTFESVETILDYIIHPAHVAFGKKYRSFWEKLLIFDYKPRK

SEQ ID NO: 897 - protein, 101 aa, Artificial Sequence
  Synthetic
MAVKHLIVLKFKDEITNDQKEEFFKTYVNLLNIIPAMKDVYWGKDVTQKNKEEGYTHIVEVTFESVETIQSYIIHPAHVGFGAKFRSFWEKLLIFDYTPRK

SEQ ID NO: 898 - protein, 101 aa, Artificial Sequence
  Synthetic
MAVKHLIVLKFKDEITEDQKEEFFKRYVNLVNRIPAMKGVYWGKDVTQKNKHEGFTHIVEVTFESVETIADYIIHPAHVAFGKKYRSFWEKLLIFDYTPRK

SEQ ID NO: 899 - protein, 101 aa, Artificial Sequence
  Synthetic
MAVKHLIVLKFKREITEAQKEEFFKRYVNLVNIIPAMKGVYWGKDVTQKNKEEGYTHIVEVTFDSVETIQDYIIHPAHVGFGEKYRSFWEKLLIFDYTPRK

SEQ ID NO: 900 - protein, 101 aa, Artificial Sequence
  Synthetic
MAVKHLIVLKFKDEITEAQKEEFFKRYVNLVNHIPAMKDVYWGKDVTQKNKEEGFTHIVEVTFDSVETIADYIIHPAHVAFGKVYRSFWEKLLIFDYKPRK

SEQ ID NO: 901 - protein, 101 aa, Artificial Sequence
  Synthetic
MAVKHLIVLKFKREITEAQKEEFFKTYVNLVNIIPAMKGVYWGKDVTQKNKEEGYTHIVEVTFDNVETIQDYIIHPAHVGFGEKYRSFWEKLLIFDYTPRK

SEQ ID NO: 902 - protein, 101 aa, Artificial Sequence
  Synthetic
MAVKHLIVLKFKDEITNDQKEEFFKRYVNLLNIIPAMKDVYWGKDVTQKNKEEGYTHIVEVTFESVETIQSYIIHPAHVGFGKFYRSFWEKLLIFDYTPRK

SEQ ID NO: 903 - protein, 101 aa, Artificial Sequence
  Synthetic
MAVKHLIVLKFKDEITNDQKEEFFKRYVNLLNIIPAMKDVYWGKDVTQKNKEEGYTHIVEVTFESVETIQSYIIHPAHVGFGEFYRSFWEKLLIFDYTPRK

SEQ ID NO: 904 - protein, 101 aa, Artificial Sequence
  Synthetic
MAVKHLIVLKFKDEITNDQKEEFFKTYVNLLNIIPAMKDVYWGKDVTQKNKEEGYTHIVEVTFESVETIQSYIIHPAHVGFGAKYRSFWEKLLIFDYYPRK

SEQ ID NO: 905 - protein, 101 aa, Artificial Sequence
  Synthetic
MAVKHLIVLKFKDEITEAQKEEFFKRYVNLVNHIPAMKDVYWGKDVTQKNKEEGFTHIVEVTFESVETIADYIIHPAHVAFGKKARSFWEKLLIFDYYPRK

SEQ ID NO: 906 - protein, 101 aa, Artificial Sequence
  Synthetic
MAVKHLIVLKFKDEITNDQKEEFFKTYVNLLNIIPAMKDVYWGKDVTQKNKEEGYTHIVEVTFESVETIQSYIIHPAHVGFGKKYRSFWEKLLIFDYTPRK

SEQ ID NO: 907 - protein, 101 aa, Artificial Sequence
  Synthetic
MAVKHLIVLKFKDEITEAQKEEFFKTYVNLVNIIPAMKGVYWGKDVTQKNKEEGYTHIVEVTFDNVETIQDYIIHPAHVGFGEKYRSFWEKLLIFDYKPRK

SEQ ID NO: 908 - protein, 101 aa, Artificial Sequence
  Synthetic
MAVKHLIVLKFKDEITNDQKEEFFKTYVNLLNNIPAMKDVYWGKDVTQKNKEEGYTHIVEVTFENVETIQSYIIHPAHVGFGDKYRSFWEKLLIFDYTPRK

SEQ ID NO: 909 - protein, 101 aa, Artificial Sequence
  Synthetic
MAVKHLIVLKFKDEITEDQKEKFFKRYVNLVNRIPAMKDVYWGKDVTQKNKHEGFTHIVEVTFESVETIADYIIHPAHVAFRNKYRSFWEKLLIFDYTPRK

SEQ ID NO: 910 - protein, 101 aa, Artificial Sequence
  Synthetic
MAVKHLIVLKFKDEITNAQKEEFFKTYVNLLNNIPAMKDVYWGKDVTQKNKEEGYTHIVEVTFESYETIQSYIIHPAHVGFRDFYRSFWEKLLIFDYTPRK

SEQ ID NO: 911 - protein, 101 aa, Artificial Sequence
  Synthetic
MAVKHLIVLKFKDEITEAQKEEFFKRYVNLVNIIPAMKGVYWGKDVTQKNKEEGYTHIVEVTFDNVETIQDYIIHPAHVGFGEKYRSFWEKLLIFDYTPRK

SEQ ID NO: 912 - protein, 101 aa, Artificial Sequence
  Synthetic
MAVKHLIVLKFKDEITEAQKEEFFKRYVNLVNHIPAMKDVYWGKDVTQKNKEEGFTHIVEVTFESVETIADYIGHPAHVAFGKKARSFWEKLLIFDYTPRK

SEQ ID NO: 913 - protein, 101 aa, Artificial Sequence
  Synthetic
MAVKHLIVLKFKDEITNDQKEEFFKTYVNLLNIIPAMKDVYWGKDVTQKNKEEGYTHIVEVTFDSVETIQSYIIHPAHVGFGAKYRSFWEKLLIFDYTPRK

SEQ ID NO: 914 - protein, 101 aa, Artificial Sequence
  Synthetic
MAVKHLIVLKFKDEITNDQKEEFFKTYVNLLNNIPAMKDVYWGKDVTQKNKEEGYTHIVEVTFESYETIQEYIIHPAHVGFGDFYRSFWEKLLIFDYTPRK

SEQ ID NO: 915 - protein, 101 aa, Artificial Sequence
  Synthetic
MAVKHLIVLKFKDEITEAQKEEFFKRYVNLVNHIPAMKDVYWGKDVTQKNKEEGFTHIVEVTFENVETIADYIGHPAHVAFGKVARSFWEKLLIFDYTPRK

SEQ ID NO: 916 - protein, 101 aa, Artificial Sequence
  Synthetic
MAVKHLIVLKFKDEITEAQKEKFFKTYVNLVNIIPAMKDVYWGKDVTQKNKEEGYTHIVESTFESYETIQEYIIHPAHVGFGKVYRSFWEKLLIFDYKPRK

SEQ ID NO: 917 - protein, 101 aa, Artificial Sequence
  Synthetic
MAVKHLIVLKFKDEITNAQKEEFFKTYVNLLNIIPAMKDVYWGKDVTQKNKEEGYTHIVEVTFESVETIQSYIIHPAHVGFGAKFRSFWEKLLIFDYTPRK

SEQ ID NO: 918 - protein, 101 aa, Artificial Sequence
  Synthetic
MAVKHLIVLKFKDEITNDQKEEFFKTYVNLLNNIPAMKDVYWGKDVTQKNKEEGYTHIVEVTFESVETIQSYIIHPAHVGFRDFYRSFWEKLLIFDYTPRK

SEQ ID NO: 919 - protein, 101 aa, Artificial Sequence
  Synthetic
MAVKHLIVLKFKDEITNAQKEKFFKTYVNLLNIIPAMKDVYWGKDVTQKNKEEGYTHIVEVTFESVETIQEYIIHPAHVGFGAFYRSFWEKLLIFDYTPRK

SEQ ID NO: 920 - protein, 101 aa, Artificial Sequence
  Synthetic
MAVKHLIVLKFKDEITNDQKEEFFKTYVNLLNNIPAMKDVYWGKDVTQKNKEEGYTHIVEVTFESVETIQSYIGHPAHVGFGKFYRSFWEKLLIFDYTPRK

SEQ ID NO: 921 - protein, 101 aa, Artificial Sequence
  Synthetic
MAVKHLIVLKFKDEITNAQKEEFFKTYVNLLNNIPAMKDVYWGKDVTQKNKEEGYTHIVEVTFDSVETIQSYIIHPAHVGFGDFYRSFWEKLLIFDYTPRK

SEQ ID NO: 922 - protein, 101 aa, Artificial Sequence
  Synthetic
MAVKHLIVLKFKDEITNAQKEEFFKTYVNLLNNIPAMKDVYWGKDVTQKNKEEGYTHIVEVTFESVETIQSYIIHPAHVGFGDKFRSFWEKLLIFDYTPRK

SEQ ID NO: 923 - protein, 101 aa, Artificial Sequence
  Synthetic
MAVKHLIVLKFKREITEAQKEEFFKRYVNLVNIIPAMKDVYWGKDVTQKNKEEGYTHIVEVTFENVETIQDYIIHPAHVGFGEKYRSFWEKLLIFDYKPRK

SEQ ID NO: 924 - protein, 101 aa, Artificial Sequence
  Synthetic
MAVKHLIVLKFKDEITNAQKEEFFKTYVNLLNNIPAMKDVYWGKDVTQKNKEEGYTHIVEVTFESYETIQEYIIHPAHVGFGDFYRSFWEKLLIFDYTPRK

SEQ ID NO: 925 - protein, 101 aa, Artificial Sequence
  Synthetic
MAVKHLIVLKFKREITEDQKEEFFKTYVSLVNIIPAMKDVYWGKDVTQKNKEEGYTHIVEVTFESVETILQYIIHPAHVAFGKKYRSFWEKLLIFDYTPRK

SEQ ID NO: 926 - protein, 101 aa, Artificial Sequence
  Synthetic
MAVKHLIVLKFKREITEAQKEEFFKRYVNLVNIIPAMKGVYWGKDVTQKNKEEGYTHIVEVTFESVETIQDYIIHPAHVGFGEKYRSFWEKLLIFDYKPRK

SEQ ID NO: 927 - protein, 101 aa, Artificial Sequence
  Synthetic
MAVKHLIVLKFKREITEDQKEEFFKRYVNLVNIIPAMKDVYWGKDVTQKNKHEGFTHIVEVTFDSVETIADYIIHPAHVAFGNKYRSFWEKLLIFDYTPRK

SEQ ID NO: 928 - protein, 101 aa, Artificial Sequence
  Synthetic
MAVKHLIVLKFKDEITNDQKEEFFKTYVNLLNNIPAMKDVYWGKDVTQKNKEEGYTHIVEVTFESVETIQSYIIHPAHVGFGDKYRSFWEKLLIFDYTPRK

SEQ ID NO: 929 - protein, 101 aa, Artificial Sequence
  Synthetic
MAVKHLIVLKFKREITEDQKEEFFKTYVSLVNIIPAMKGVYWGKDVTQKNKEEGYTHIVEVTFENVETILQYIIHPAHVAFGKVYRSFWEKLLIFDYTPRK

SEQ ID NO: 930 - protein, 101 aa, Artificial Sequence
  Synthetic
MAVKHLIVLKFKDEITNDQKEEFFKTYVNLLNNIPAMKDVYWGKDVTQKNKEEGYTHIVEVTFESYETIQSYIIHPAHVGFGDFYRSFWEKLLIFDYTPRK

SEQ ID NO: 931 - protein, 101 aa, Artificial Sequence
  Synthetic
MAVKHLIVLKFKDEITNAQKEEFFKTYVNLLNNIPAMKDVYWGKDVTQKNKEEGYTHIVEVTFESVETIQSYIIHPAHVGFGKFYRSFWEKLLIFDYYPRK

SEQ ID NO: 932 - protein, 101 aa, Artificial Sequence
  Synthetic
MAVKHLIVLKFKDEITEDQKEEFFKRYVNLVNHIPAMKDVYWGKDVTQKNKEEGFTHIVEVTFDSVETIADYIIHPAHVAFGKVARSFWEKLLIFDYTPRK

SEQ ID NO: 933 - protein, 101 aa, Artificial Sequence
  Synthetic
MAVKHLIVLKFKDEITNDQKEEFFKRYVNLLNIIPAMKDVYWGKDVTQKNKEEGYTHIVEVTFESVETIQSYIIHPAHVGFGAKYRSFWEKLLIFDYTPRK

SEQ ID NO: 934 - protein, 101 aa, Artificial Sequence
  Synthetic
MAVKHLIVLKFKDEITEDQKEEFFKRYVNLVNRIPAMKDVYWGKDVTQKNKHEGFTHIVEVTFDSVETIADYIIHPAHVAFGNKYRSFWEKLLIFDYKPRK

SEQ ID NO: 935 - protein, 101 aa, Artificial Sequence
  Synthetic
MAVKHLIVLKFKDEITEDQKEEFFKRYVNLVNRIPAMKDVYWGKDVTQKNKHEGFTHIVEVTFESVETIADYIIHPAHVAFGEKYRSFWEKLLIFDYYPRK

SEQ ID NO: 936 - protein, 101 aa, Artificial Sequence
  Synthetic
MAVKHLIVLKFKDEITNAQKEEFFKRYVNLLNIIPAMKDVYWGKDVTQKNKEEGYTHIVEVTFESVETIQSYIIHPAHVGFGAKYRSFWEKLLIFDYTPRK

SEQ ID NO: 937 - protein, 101 aa, Artificial Sequence
  Synthetic
MAVKHLIVLKFKDEITEDQKEEFFKRYVNLVNIIPAMKDVYWGKDVTQKNKHEGFTHIVESTFESVETIADYIIHPAHVAFGNKFRSFWEKLLIFDYTPRK

SEQ ID NO: 938 - protein, 101 aa, Artificial Sequence
  Synthetic
MAVKHLIVLKFKDEITEAQKEEFFKRYVNLVNHIPAMKDVYWGKDVTQKNKEEGFTHIVEVTFDNVETIADYIIHPAHVAFGKVYRSFWEKLLIFDYTPRK

SEQ ID NO: 939 - protein, 101 aa, Artificial Sequence
  Synthetic
MAVKHLIVLKFKREITEDQKEEFFKTYVSLVNIIPAMKGVYWGKDVTQKNKEEGYTHIVEVTFESVETILDYIIHPAHVAFGKVFRSFWEKLLIFDYTPRK

SEQ ID NO: 940 - protein, 101 aa, Artificial Sequence
  Synthetic
MAVKHLIVLKFKDEITEDQKEEFFKRYVNLVNHIPAMKDVYWGKDVTQKNKEEGFTHIVEVTFENVETIADYIIHPAHVAFGKVARSFWEKLLIFDYTPRK

SEQ ID NO: 941 - protein, 101 aa, Artificial Sequence
  Synthetic
MAVKHLIVLKFKDEITEAQKEEFFKRYVNLVNHIPAMKDVYWGKDVTQKNKEEGFTHIVEVTFENVETIADYIIHPAHVAFGEVARSFWEKLLIFDYTPRK

SEQ ID NO: 942 - protein, 101 aa, Artificial Sequence
  Synthetic
MAVKHLIVLKFKDEITNDQKEEFFKTYVNLLNIIPAMKDVYWGKDVTQKNKEEGYTHIVEVTFDSVETIQSYIIHPAHVGFGKFYRSFWEKLLIFDYTPRK

SEQ ID NO: 943 - protein, 101 aa, Artificial Sequence
  Synthetic
MAVKHLIVLKFKDEITEDQKEEFFKRYVNLVNHIPAMKDVYWGKDVTQKNKEEGFTHIVEVTFESVETIADYIIHPAHVAFGKVYRSFWEKLLIFDYKPRK

SEQ ID NO: 944 - protein, 101 aa, Artificial Sequence
  Synthetic
MAVKHLIVLKFKDEITEDQKEEFFKRYVNLVNRIPAMKGVYWGKDVTQKNKHEGFTHIVEVTFESVETIADYIIHPAHVAFGEKYRSFWEKLLIFDYTPRK

SEQ ID NO: 945 - protein, 101 aa, Artificial Sequence
  Synthetic
MAVKHLIVLKFKDEITNAQKEEFFKTYVNLLNIIPAMKDVYWGKDVTQKNKEEGYTHIVEVTFDSVETIQSYIIHPAHVGFGAKYRSFWEKLLIFDYTPRK

SEQ ID NO: 946 - protein, 101 aa, Artificial Sequence
  Synthetic
MAVKHLIVLKFKREITEAQKEKFFKTYVNLVNIIPAMKDVYWGKDVTQKNKEEGYTHIVEVTFESYETIQEYIIHPAHVGFRDVYRSFWEKLLIFDYKPRK

SEQ ID NO: 947 - protein, 101 aa, Artificial Sequence
  Synthetic
MAVKHLIVLKFKREITNDQKEEFFKTYVNLLNNIPAMKDVYWGKDVTQKNKEEGYTHIVEVTFESVETIQSYIIHPAHVGFGDKYRSFWEKLLIFDYTPRK

SEQ ID NO: 948 - protein, 101 aa, Artificial Sequence
  Synthetic
MAVKHLIVLKFKDEITNAQKEEFFKTYVNLLNNIPAMKDVYWGKDVTQKNKEEGYTHIVEVTFESVETIQSYIIHPAHVGFGEKYRSFWEKLLIFDYTPRK

SEQ ID NO: 949 - DNA, 306 bp, Artificial Sequence
  Synthetic
atggcagtgaagcatttaatcgtcttgaaatttaaggacgagattactgaagctcagaaagaagaatttttcaagacctacgttaaccttgttaatataattccagctatgaaggatgtctattggggtaaggatgttacgcaaaagaacaaagaagaaggatacacacacatcgtagaagtcaccttcgaatccgttgagactattcaagactatatcattcaccccgcccatgttggtttcggcgacgtgtacagaagtttttgggaaaagctattgatattcgattacactcctcgtaagtaa

SEQ ID NO: 950 - DNA, 306 bp, Artificial Sequence
  Synthetic
atggctgtcaagcatcttattgttctaaaatttaaggatgagataaccgaagcccagaaagaagaatttttcaagacttatgtaaatctggtgaacatcattcctgctatgaaggacgtctactggggtaaggatgttacgcaaaagaacaaagaagaaggctacacacacatcgttgaggtcactttcgaatctgttgaaaccattcaagactatataatccatccagcacacgttggattcggtgatgtgtacagatcattctgggaaaagttgttaatttttgactacactccaaggaaataa

SEQ ID NO: 951 - DNA, 306 bp, Artificial Sequence
  Synthetic
atggcagtcaagcatctaatcgttttaaaatttaaggatgaaattacggaggctcaaaaagaagaatttttcaagacatacgtaaatcttgttaacataatcccagccatgaaggacgtgtattggggtaaagatgtcactcagaagaacaaggaagaaggctacactcacattgttgaggtcaccttcgaaagcgttgaaaccatccaagactacattatccaccccgctcatgttggtttcggtgatgtctatagatcattctgggaaaaattgttgatttttgactacactcctcgtaagtaa

SEQ ID NO: 952 - DNA, 306 bp, Artificial Sequence
  Synthetic
atggcagtcaagcatctaatcgttttaaaatttaaggatgaaattacgaatgctcaaaaagaagaatttttcaagacatacgtaaatcttgttaacataatcccagccatgaaggacgtgtattggggtaaagatgtcactcagaagaacaaggaagaaggctacactcacattgttgaggtcaccttcgaaagcgttgaaaccatccaagactacattatccaccccgctcatgttggtttcggtgatgtctatagatcattctgggaaaaattgttgatttttgactacactcctcgtaagtaa

SEQ ID NO: 953 - DNA, 306 bp, Artificial Sequence
  Synthetic
atggcagtcaagcatctaatcgttttaaaatttaaggatgaaattacggaggctcaaaaagaagaatttttcaaggcttacgtaaatcttgttaacataatcccagccatgaaggacgtgtattggggtaaagatgtcactcagaagaacaaggaagaaggctacactcacattgttgaggtcaccttcgaaagcgttgaaaccatccaagactacattatccaccccgctcatgttggtttcggtgatgtctatagatcattctgggaaaaattgttgatttttgactacactcctcgtaagtaa

SEQ ID NO: 954 - DNA, 306 bp, Artificial Sequence
  Synthetic
atggcagtcaagcatctaatcgttttaaaatttaaggatgaaattacggaggctcaaaaagaagaatttttcaagacatacgtaaatcttgttaacataatcccagccatgaaggacgtgtattggggtaaagatgtcactcagaagaacaaggaagaaggctacactcacattgttgaggtcaccttcgaaagcgttgaaaccatccaatcctacattatccaccccgctcatgttggtttcggtgatgtctatagatcattctgggaaaaattgttgatttttgactacactcctcgtaagtaa

SEQ ID NO: 955 - DNA, 306 bp, Artificial Sequence
  Synthetic
atggcagtcaagcatctaatcgttttaaaatttaaggatgaaattacggaggctcaaaaagaagaatttttcaagacatacgtaaatcttgttaacaacatcccagccatgaaggacgtgtattggggtaaagatgtcactcagaagaacaaggaagaaggctacactcacattgttgaggtcaccttcgaaagcgttgaaaccatccaagactacattatccaccccgctcatgttggtttcggtgatgtctatagatcattctgggaaaaattgttgatttttgactacactcctcgtaagtaa

SEQ ID NO: 956 - DNA, 306 bp, Artificial Sequence
  Synthetic
atggcagtcaagcatctaatcgttttaaaatttaaggatgaaattacggaggctcaaaaagaagaatttttcaagacatacgtaaatcttgttaacataatcccagccatgaagcaggtgtattggggtaaagatgtcactcagaagaacaaggaagaaggctacactcacattgttgaggtcaccttcgaaagcgttgaaaccatccaagactacattatccaccccgctcatgttggtttcggtgatgtctatagatcattctgggaaaaattgttgatttttgactacactcctcgtaagtaa

SEQ ID NO: 957 - DNA, 306 bp, Artificial Sequence
  Synthetic
atggcagtcaagcatctaatcgttttaaaatttaaggatgaaattacggaggctcaaaaagaagaatttttcaagacatacgtaaatcttgttaacataatcccagccttgaaggacgtgtattggggtaaagatgtcactcagaagaacaaggaagaaggctacactcacattgttgaggtcaccttcgaaagcgttgaaaccatccaagactacattatccaccccgctcatgttggtttcggtgatgtctatagatcattctgggaaaaattgttgatttttgactacactcctcgtaagtaa

SEQ ID NO: 958 - DNA, 306 bp, Artificial Sequence
  Synthetic
atggcagtcaagcatctaatcgttttaaaatttaaggatgaaattacggaggctcaaaaagaagaatttttcaagacatacgtaaatcttgttaacataatcccagccatgaaggacgtgtattggggtaaagatgtcactcagaagaacaaggaagaaggctacactcacattgttgaggtcaccttcgaaagcgttgaaaccatccaagactacattatccaccccgctcatgttggtttcggtgatgtctatagatcattctgggaaaaattgttgattatggactacactcctcgtaagtaa

SEQ ID NO: 959 - DNA, 306 bp, Artificial Sequence
  Synthetic
atggcagtcaagcatctaatcgttttaaaatttaaggatgaaattacggaggctcaaaaagaagaatttttcaagacatacgtaactcttgttaacataatcccagccatgaaggacgtgtattggggtaaagatgtcactcagaagaacaaggaagaaggctacactcacattgttgaggtcaccttcgaaagcgttgaaaccatccaagactacattatccaccccgctcatgttggtttcggtgatgtctatagatcattctgggaaaaattgttgatttttgactacactcctcgtaagtaa

SEQ ID NO: 960 - DNA, 306 bp, Artificial Sequence
  Synthetic
atggcagtcaagcatctaatcgttttaaaatttaaggatgaaattacggaggctcaaaaagaagaatttttcaagacatacgtaaatcttgttaacataatcccagccatgaaggacgtgtattggggtaaagatgtcactcagaagaacaaggaagaaggctacactcacattgttgaggtcaccttcgaaagcgttgaaaccatccaagactacattatccaccccgctcatgttggtttcggtgatttctatagatcattctgggaaaaattgttgatttttgactacactcctcgtaagtaa

SEQ ID NO: 961 - DNA, 306 bp, Artificial Sequence
  Synthetic
atggcagtcaagcatctaatcgttttaaaatttaaggatgaaattacggaggctcaaaaagaagaatttttcaagacatacgtaaatcttgttaacataatcccagccatgaaggacgtgtattggggtaaagatgtcactcagaagaacaaggaagaaggctacactcacattgttgaggtcaccttcgaaagcgttgaaaccatccaagactacattatccaccccgctcatgttggtttcggtcaagtctatagatcattctgggaaaaattgttgatttttgactacactcctcgtaagtaa

SEQ ID NO: 962 - DNA, 306 bp, Artificial Sequence
  Synthetic
atggcagtcaagcatctaatcgttttaaaatttaaggatgaaattacggaggctcaaaaagaagaatttttcaagacatacgtaaatcttttgaacataatcccagccatgaaggacgtgtattggggtaaagatgtcactcagaagaacaaggaagaaggctacactcacattgttgaggtcaccttcgaaagcgttgaaaccatccaagactacattatccaccccgctcatgttggtttcggtgatgtctatagatcattctgggaaaaattgttgatttttgactacactcctcgtaagtaa

SEQ ID NO: 963 - DNA, 306 bp, Artificial Sequence
  Synthetic
atggcagtcaagcatctaatcgttttaaaatttaaggatgaaattacggaggaccaaaaagaagaatttttcaagacatacgtaaatcttgttaacataatcccagccatgaaggacgtgtattggggtaaagatgtcactcagaagaacaaggaagaaggctacactcacattgttgaggtcaccttcgaaagcgttgaaaccatccaagactacattatccaccccgctcatgttggtttcggtgatgtctatagatcattctgggaaaaattgttgatttttgactacactcctcgtaagtaa

SEQ ID NO: 964 - DNA, 306 bp, Artificial Sequence
  Synthetic
atggcagtcaagcatctaatcgttttaaaatttaaggatgaaattacggaggctcaaaaagaagaatttttcaagacatacgtaaatcttgttaacataatcccagccatgaagggagtgtattggggtaaagatgtcactcagaagaacaaggaagaaggctacactcacattgttgaggtcaccttcgaaagcgttgaaaccatccaagactacattatccaccccgctcatgttggtttcggtgatgtctatagatcattctgggaaaaattgttgatttttgactacactcctcgtaagtaa

SEQ ID NO: 965 - DNA, 306 bp, Artificial Sequence
  Synthetic
atggcagtcaagcatctaatcgttttaaaatttaaggatgaaattacggaggctcaaaaagaagaatttttcaagacatacgtaaatcttgttaacataatcccagccatgaaggacgtgtattggggtaaagatgtcactcagaagaacaaggaagaaggctacactcacattgttgaggtcaccttcgaaagcgttgaaaccatccaagactacattatccaccccgctcatgttggtttcggtgctgtctatagatcattctgggaaaaattgttgatttttgactacactcctcgtaagtaa

SEQ ID NO: 966 - DNA, 306 bp, Artificial Sequence
  Synthetic
atggcagtcaagcatctaatcgttttaaaatttaaggatgaaattacggaggctcaaaaagaagaatttttcaagacatacgtaaatcttgttaaccgtatcccagccatgaaggacgtgtattggggtaaagatgtcactcagaagaacaaggaagaaggctacactcacattgttgaggtcaccttcgaaagcgttgaaaccatccaagactacattatccaccccgctcatgttggtttcggtgatgtctatagatcattctgggaaaaattgttgatttttgactacactcctcgtaagtaa

SEQ ID NO: 967 - DNA, 306 bp, Artificial Sequence
  Synthetic
atggcagtcaagcatctaatcgttttaaaatttaaggatgaaattacggaggctcaaaaagaagaatttttcaagacatacgtaaatcttgttaaccacatcccagccatgaaggacgtgtattggggtaaagatgtcactcagaagaacaaggaagaaggctacactcacattgttgaggtcaccttcgaaagcgttgaaaccatccaagactacattatccaccccgctcatgttggtttcggtgatgtctatagatcattctgggaaaaattgttgatttttgactacactcctcgtaagtaa

SEQ ID NO: 968 - DNA, 306 bp, Artificial Sequence
  Synthetic
atggcagtcaagcatctaatcgttttaaaatttaaggatgaaattacggaggctcaaaaagaagaatttttcaagcactacgtaaatcttgttaacataatcccagccatgaaggacgtgtattggggtaaagatgtcactcagaagaacaaggaagaaggctacactcacattgttgaggtcaccttcgaaagcgttgaaaccatccaagactacattatccaccccgctcatgttggtttcggtgatgtctatagatcattctgggaaaaattgttgatttttgactacactcctcgtaagtaa

SEQ ID NO: 969 - DNA, 306 bp, Artificial Sequence
  Synthetic
atggcagtcaagcatctaatcgttttaaaatttaaggatgaaattacggaggctcaaaaagaagaatttttcaagacatacgtaaatcttgttaacataatcccagccatgaaggacgtgtattggggtaaagatgtcactcagaagaacaaggaagaaggctacactcacattgttgaggtcaccttcgaaagcgttgaaaccatccaagactacattatccaccccgctcatgttgctttcggtgatgtctatagatcattctgggaaaaattgttgatttttgactacactcctcgtaagtaa

SEQ ID NO: 970 - DNA, 306 bp, Artificial Sequence
  Synthetic
atggcagtcaagcatctaatcgttttaaaatttaaggatgaaattacggaggctcaaaaagaagaatttttcaagacatacgtaaatcttgttaacataatcccagccatgaaggacgtgtattggggtaaagatgtcactcagaagaacaaggaagaaggctacactcacattgttgaggtcaccttcgaaagcgttgaaaccatccaagactacattatccaccccgctcatgttggtttcggtaatgtctatagatcattctgggaaaaattgttgatttttgactacactcctcgtaagtaa

SEQ ID NO: 971 - DNA, 306 bp, Artificial Sequence
  Synthetic
atggccgtcaagcatctgattgtattgaaatttaaggacgagatcacggaagcacaaaaggaagaatttttcaaagcttatgttaatttagttaacataatccctgctatgaagcaagtctactggggtaaggatgtgacacagaaaaacaaggaagaaggctacactcacattgtggaagttaccttcgagagcgttgaaactattcaagactacatcatccaccccgctcatgtcggattcggtcaagtctatcgttccttttgggaaaaattgttgattttcgactataccccaagaaagtaa

SEQ ID NO: 972 - DNA, 306 bp, Artificial Sequence
  Synthetic
atggccgtcaagcatctgattgtattgaaatttaaggacgagatcacggaagcacaaaaggaagaatttttcaaagcttatgttactttagttaacataatccctgctatgaaggatgtctactggggtaaggatgtgacacagaaaaacaaggaagaaggctacactcacattgtggaagttaccttcgagagcgttgaaactattcaagactacatcatccaccccgctcatgtcggattcggtgatgtctatcgttccttttgggaaaaattgttgattttcgactataccccaagaaagtaa

SEQ ID NO: 973 - DNA, 306 bp, Artificial Sequence
  Synthetic
atggccgtcaagcatctgattgtattgaaatttaaggacgagatcacggaagcacaaaaggaagaatttttcaaaacttatgttaatttagttaacataatccctgctatgaaggatgtctactggggtaaggatgtgacacagaaaaacaaggaagaaggctacactcacattgtggaagttaccttcgagagcgttgaaactattcaatcctacatcatccaccccgctcatgtcggattcggtaacgtctatcgttccttttgggaaaaattgttgattatggactataccccaagaaagtaa

SEQ ID NO: 974 - DNA, 306 bp, Artificial Sequence
  Synthetic
atggccgtcaagcatctgattgtattgaaatttaaggacgagatcacggaagcacaaaaggaagaatttttcaaaacttatgttaatttagttaacataatccctgctatgaagggtgtctactggggtaaggatgtgacacagaaaaacaaggaagaaggctacactcacattgtggaagttaccttcgagagcgttgaaactattcaatcctacatcatccaccccgctcatgtcggattcggtaacgtctatcgttccttttgggaaaaattgttgattttcgactataccccaagaaagtaa

SEQ ID NO: 975 - DNA, 306 bp, Artificial Sequence
  Synthetic
atggccgtcaagcatctgattgtattgaaatttaaggacgagatcacggaagcacaaaaggaagaatttttcaaaacttatgttaatttagttaacataatccctgctatgaagcaagtctactggggtaaggatgtgacacagaaaaacaaggaagaaggctacactcacattgtggaagttaccttcgagagcgttgaaactattcaagactacatcatccaccccgctcatgtcggattcggtcaagtctatcgttccttttgggaaaaattgttgattttcgactataccccaagaaagtaa

SEQ ID NO: 976 - DNA, 306 bp, Artificial Sequence
  Synthetic
atggccgtcaagcatctgattgtattgaaatttaaggacgagatcacggaagcacaaaaggaagaatttttcaaacattatgttactttagttaaccgtatccctgctatgaaggatgtctactggggtaaggatgtgacacagaaaaacaaggaagaaggctacactcacattgtggaagttaccttcgagagcgttgaaactattcaagactacatcatccaccccgctcatgtcggattcggtgatgtctatcgttccttttgggaaaaattgttgattttcgactataccccaagaaagtaa

SEQ ID NO: 977 - DNA, 306 bp, Artificial Sequence
  Synthetic
atggccgtcaagcatctgattgtattgaaatttaaggacgagatcacggaagcacaaaaggaagaatttttcaaagcttatgttaatttagttaacataatccctgctatgaaggatgtctactggggtaaggatgtgacacagaaaaacaaggaagaaggctacactcacattgtggaagttaccttcgagagcgttgaaactattcaagactacatcatccaccccgctcatgtcggattcggtaacgtctatcgttccttttgggaaaaattgttgattatggactataccccaagaaagtaa

SEQ ID NO: 978 - DNA, 306 bp, Artificial Sequence
  Synthetic
atggccgtcaagcatctgattgtattgaaatttaaggacgagatcacggaagcacaaaaggaagaatttttcaaaacttatgttaatttagttaaccgtatccctgctatgaagcaagtctactggggtaaggatgtgacacagaaaaacaaggaagaaggctacactcacattgtggaagttaccttcgagagcgttgaaactattcaagactacatcatccaccccgctcatgtcggattcggtgatttctatcgttccttttgggaaaaattgttgattttcgactataccccaagaaagtaa

SEQ ID NO: 979 - DNA, 306 bp, Artificial Sequence
  Synthetic
atggccgtcaagcatctgattgtattgaaatttaaggacgagatcacggaagcacaaaaggaagaatttttcaaaacttatgttaatttagttaacataatccctgctatgaaggatgtctactggggtaaggatgtgacacagaaaaacaaggaagaaggctacactcacattgtggaagttaccttcgagagcgttgaaactattcaatcctacatcatccaccccgctcatgtcggattcggtcaagtctatcgttccttttgggaaaaattgttgattttcgactataccccaagaaagtaa

SEQ ID NO: 980 - DNA, 306 bp, Artificial Sequence
  Synthetic
atggccgtcaagcatctgattgtattgaaatttaaggacgagatcacggaagcacaaaaggaagaatttttcaaacattatgttaatttagttaaccgtatccctgctatgaaggatgtctactggggtaaggatgtgacacagaaaaacaaggaagaaggctacactcacattgtggaagttaccttcgagagcgttgaaactattcaagactacatcatccaccccgctcatgtcgctttcggtgatgtctatcgttccttttgggaaaaattgttgattttcgactataccccaagaaagtaa

SEQ ID NO: 981 - DNA, 306 bp, Artificial Sequence
  Synthetic
atggccgtcaagcatctgattgtattgaaatttaaggacgagatcacggaagcacaaaaggaagaatttttcaaaacttatgttaatttattgaacataatccctgctatgaaggatgtctactggggtaaggatgtgacacagaaaaacaaggaagaaggctacactcacattgtggaagttaccttcgagagcgttgaaactattcaatcctacatcatccaccccgctcatgtcggattcggtcaagtctatcgttccttttgggaaaaattgttgattttcgactataccccaagaaagtaa

SEQ ID NO: 982 - DNA, 306 bp, Artificial Sequence
  Synthetic
atggccgtcaagcatctgattgtattgaaatttaaggacgagatcacggaagcacaaaaggaagaatttttcaaaacttatgttaatttagttaacaacatccctgctatgaagggtgtctactggggtaaggatgtgacacagaaaaacaaggaagaaggctacactcacattgtggaagttaccttcgagagcgttgaaactattcaagactacatcatccaccccgctcatgtcggattcggtcaagtctatcgttccttttgggaaaaattgttgattttcgactataccccaagaaagtaa

SEQ ID NO: 983 - DNA, 306 bp, Artificial Sequence
  Synthetic
atggccgtcaagcatctgattgtattgaaatttaaggacgagatcacggaagcacaaaaggaagaatttttcaaaacttatgttaatttagttaaccatatccctgctatgaaggatgtctactggggtaaggatgtgacacagaaaaacaaggaagaaggctacactcacattgtggaagttaccttcgagagcgttgaaactattcaagactacatcatccaccccgctcatgtcggattcggtcaagtctatcgttccttttgggaaaaattgttgattatggactataccccaagaaagtaa

SEQ ID NO: 984 - DNA, 306 bp, Artificial Sequence
  Synthetic
atggccgtcaagcatctgattgtattgaaatttaaggacgagatcacggaagcacaaaaggaagaatttttcaaaacttatgttactttagttaacaacatccctgctatgaaggatgtctactggggtaaggatgtgacacagaaaaacaaggaagaaggctacactcacattgtggaagttaccttcgagagcgttgaaactattcaatcctacatcatccaccccgctcatgtcggattcggtgatgtctatcgttccttttgggaaaaattgttgattttcgactataccccaagaaagtaa

SEQ ID NO: 985 - DNA, 306 bp, Artificial Sequence
  Synthetic
atggccgtcaagcatctgattgtattgaaatttaaggacgagatcacggaagcacaaaaggaagaatttttcaaacattatgttaatttagttaacaacatccctgctatgaaggatgtctactggggtaaggatgtgacacagaaaaacaaggaagaaggctacactcacattgtggaagttaccttcgagagcgttgaaactattcaagactacatcatccaccccgctcatgtcgctttcggtgatgtctatcgttccttttgggaaaaattgttgattttcgactataccccaagaaagtaa

SEQ ID NO: 986 - DNA, 306 bp, Artificial Sequence
  Synthetic
atggccgtcaagcatctgattgtattgaaatttaaggacgagatcacgaacgcacaaaaggaagaatttttcaaaacttatgttactttagttaacataatccctgctatgaaggatgtctactggggtaaggatgtgacacagaaaaacaaggaagaaggctacactcacattgtggaagttaccttcgagagcgttgaaactattcaagactacatcatccaccccgctcatgtcgctttcggtgatgtctatcgttccttttgggaaaaattgttgattttcgactataccccaagaaagtaa

SEQ ID NO: 987 - DNA, 306 bp, Artificial Sequence
  Synthetic
atggccgtcaagcatctgattgtattgaaatttaaggacgagatcacggaagcacaaaaggaagaatttttcaaaacttatgttactttagttaaccatatccctgctatgaaggatgtctactggggtaaggatgtgacacagaaaaacaaggaagaaggctacactcacattgtggaagttaccttcgagagcgttgaaactattcaatcctacatcatccaccccgctcatgtcggattcggtgatgtctatcgttccttttgggaaaaattgttgattttcgactataccccaagaaagtaa

SEQ ID NO: 988 - DNA, 306 bp, Artificial Sequence
  Synthetic
atggccgtcaagcatctgattgtattgaaatttaaggacgagatcacggaagcacaaaaggaagaatttttcaaacattatgttaatttattgaacataatccctgctatgaaggatgtctactggggtaaggatgtgacacagaaaaacaaggaagaaggctacactcacattgtggaagttaccttcgagagcgttgaaactattcaagactacatcatccaccccgctcatgtcggattcggtgctgtctatcgttccttttgggaaaaattgttgattttcgactataccccaagaaagtaa

SEQ ID NO: 989 - DNA, 306 bp, Artificial Sequence
  Synthetic
atggccgtcaagcatctgattgtattgaaatttaaggacgagatcacggaagcacaaaaggaagaatttttcaaaacttatgttaatttagttaaccgtatccctgctatgaagggtgtctactggggtaaggatgtgacacagaaaaacaaggaagaaggctacactcacattgtggaagttaccttcgagagcgttgaaactattcaagactacatcatccaccccgctcatgtcggattcggtaacgtctatcgttccttttgggaaaaattgttgattttcgactataccccaagaaagtaa

SEQ ID NO: 990 - DNA, 306 bp, Artificial Sequence
  Synthetic
atggccgtcaagcatctgattgtattgaaatttaaggacgagatcacggaagcacaaaaggaagaatttttcaaaacttatgttaatttattgaacataatccctgctatgaaggatgtctactggggtaaggatgtgacacagaaaaacaaggaagaaggctacactcacattgtggaagttaccttcgagagcgttgaaactattcaagactacatcatccaccccgctcatgtcggattcggtaacttctatcgttccttttgggaaaaattgttgattttcgactataccccaagaaagtaa

SEQ ID NO: 991 - DNA, 306 bp, Artificial Sequence
  Synthetic
atggccgtcaagcatctgattgtattgaaatttaaggacgagatcacgaacgcacaaaaggaagaatttttcaaagcttatgttactttagttaacataatccctgctatgaaggatgtctactggggtaaggatgtgacacagaaaaacaaggaagaaggctacactcacattgtggaagttaccttcgagagcgttgaaactattcaagactacatcatccaccccgctcatgtcggattcggtgatgtctatcgttccttttgggaaaaattgttgattttcgactataccccaagaaagtaa

SEQ ID NO: 992 - DNA, 306 bp, Artificial Sequence
  Synthetic
atggccgtcaagcatctgattgtattgaaatttaaggacgagatcacggaagcacaaaaggaagaatttttcaaaacttatgttaatttattgaacataatccctgctatgaagggtgtctactggggtaaggatgtgacacagaaaaacaaggaagaaggctacactcacattgtggaagttaccttcgagagcgttgaaactattcaatcctacatcatccaccccgctcatgtcggattcggtgatgtctatcgttccttttgggaaaaattgttgattttcgactataccccaagaaagtaa

SEQ ID NO: 993 - DNA, 306 bp, Artificial Sequence
  Synthetic
atggccgtcaagcatctgattgtattgaaatttaaggacgagatcacggaagcacaaaaggaagaatttttcaaacattatgttaatttattgaacataatccctgctatgaaggatgtctactggggtaaggatgtgacacagaaaaacaaggaagaaggctacactcacattgtggaagttaccttcgagagcgttgaaactattcaagactacatcatccaccccgctcatgtcggattcggtaacgtctatcgttccttttgggaaaaattgttgattttcgactataccccaagaaagtaa

SEQ ID NO: 994 - DNA, 306 bp, Artificial Sequence
  Synthetic
atggccgtcaagcatctgattgtattgaaatttaaggacgagatcacggaagcacaaaaggaagaatttttcaaaacttatgttaatttagttaaccatatccctgctatgaagcaagtctactggggtaaggatgtgacacagaaaaacaaggaagaaggctacactcacattgtggaagttaccttcgagagcgttgaaactattcaagactacatcatccaccccgctcatgtcgctttcggtgatgtctatcgttccttttgggaaaaattgttgattttcgactataccccaagaaagtaa

SEQ ID NO: 995 - DNA, 306 bp, Artificial Sequence
  Synthetic
atggccgtcaagcatctgattgtattgaaatttaaggacgagatcacggaagcacaaaaggaagaatttttcaaaacttatgttaatttagttaacataatccctgctatgaaggatgtctactggggtaaggatgtgacacagaaaaacaaggaagaaggctacactcacattgtggaagttaccttcgagagcgttgaaactattcaagactacatcatccaccccgctcatgtcggattcggtaacgtctatcgttccttttgggaaaaattgttgattatggactataccccaagaaagtaa

SEQ ID NO: 996 - DNA, 306 bp, Artificial Sequence
  Synthetic
atggccgtcaagcatctgattgtattgaaatttaaggacgagatcacggaagcacaaaaggaagaatttttcaaaacttatgttactttagttaacataatccctgctatgaagggtgtctactggggtaaggatgtgacacagaaaaacaaggaagaaggctacactcacattgtggaagttaccttcgagagcgttgaaactattcaagactacatcatccaccccgctcatgtcggattcggtgatttctatcgttccttttgggaaaaattgttgattttcgactataccccaagaaagtaa

SEQ ID NO: 997 - DNA, 306 bp, Artificial Sequence
  Synthetic
atggccgtcaagcatctgattgtattgaaatttaaggacgagatcacggaagcacaaaaggaagaatttttcaaaacttatgttaatttagttaacataatccctgctatgaagggtgtctactggggtaaggatgtgacacagaaaaacaaggaagaaggctacactcacattgtggaagttaccttcgagagcgttgaaactattcaagactacatcatccaccccgctcatgtcggattcggtgctgtctatcgttccttttgggaaaaattgttgattttcgactataccccaagaaagtaa

SEQ ID NO: 998 - DNA, 306 bp, Artificial Sequence
  Synthetic
atggccgtcaagcatctgattgtattgaaatttaaggacgagatcacggaagcacaaaaggaagaatttttcaaacattatgttactttagttaacataatccctgctatgaagcaagtctactggggtaaggatgtgacacagaaaaacaaggaagaaggctacactcacattgtggaagttaccttcgagagcgttgaaactattcaagactacatcatccaccccgctcatgtcggattcggtgatgtctatcgttccttttgggaaaaattgttgattttcgactataccccaagaaagtaa

SEQ ID NO: 999 - DNA, 306 bp, Artificial Sequence
  Synthetic
atggccgtcaagcatctgattgtattgaaatttaaggacgagatcacgaacgcacaaaaggaagaatttttcaaaacttatgttaatttagttaacaacatccctgctatgaaggatgtctactggggtaaggatgtgacacagaaaaacaaggaagaaggctacactcacattgtggaagttaccttcgagagcgttgaaactattcaagactacatcatccaccccgctcatgtcggattcggtgatttctatcgttccttttgggaaaaattgttgattttcgactataccccaagaaagtaa

SEQ ID NO: 1000 - DNA, 306 bp, Artificial Sequence
  Synthetic
atggccgtcaagcatctgattgtattgaaatttaaggacgagatcacggaagcacaaaaggaagaatttttcaaacattatgttaatttagttaacataatccctgctatgaaggatgtctactggggtaaggatgtgacacagaaaaacaaggaagaaggctacactcacattgtggaagttaccttcgagagcgttgaaactattcaagactacatcatccaccccgctcatgtcggattcggtcaagtctatcgttccttttgggaaaaattgttgattatggactataccccaagaaagtaa

SEQ ID NO: 1001 - DNA, 306 bp, Artificial Sequence
  Synthetic
atggccgtcaagcatctgattgtattgaaatttaaggacgagatcacgaacgcacaaaaggaagaatttttcaaaacttatgttaatttagttaaccgtatccctgctatgaagcaagtctactggggtaaggatgtgacacagaaaaacaaggaagaaggctacactcacattgtggaagttaccttcgagagcgttgaaactattcaagactacatcatccaccccgctcatgtcggattcggtgatgtctatcgttccttttgggaaaaattgttgattttcgactataccccaagaaagtaa

SEQ ID NO: 1002 - DNA, 306 bp, Artificial Sequence
  Synthetic
atggccgtcaagcatctgattgtattgaaatttaaggacgagatcacgaacgcacaaaaggaagaatttttcaaaacttatgttaatttagttaacataatccctgctatgaaggatgtctactggggtaaggatgtgacacagaaaaacaaggaagaaggctacactcacattgtggaagttaccttcgagagcgttgaaactattcaatcctacatcatccaccccgctcatgtcgctttcggtgatgtctatcgttccttttgggaaaaattgttgattttcgactataccccaagaaagtaa

SEQ ID NO: 1003 - DNA, 306 bp, Artificial Sequence
  Synthetic
atggccgtcaagcatctgattgtattgaaatttaaggacgagatcacggaagcacaaaaggaagaatttttcaaaacttatgttactttattgaacataatccctgctatgaaggatgtctactggggtaaggatgtgacacagaaaaacaaggaagaaggctacactcacattgtggaagttaccttcgagagcgttgaaactattcaagactacatcatccaccccgctcatgtcggattcggtaacgtctatcgttccttttgggaaaaattgttgattttcgactataccccaagaaagtaa

SEQ ID NO: 1004 - DNA, 306 bp, Artificial Sequence
  Synthetic
atggccgtcaagcatctgattgtattgaaatttaaggacgagatcacggaagcacaaaaggaagaatttttcaaaacttatgttaatttagttaacaacatccctgctatgaaggatgtctactggggtaaggatgtgacacagaaaaacaaggaagaaggctacactcacattgtggaagttaccttcgagagcgttgaaactattcaagactacatcatccaccccgctcatgtcggattcggtgatgtctatcgttccttttgggaaaaattgttgattatggactataccccaagaaagtaa

SEQ ID NO: 1005 - DNA, 306 bp, Artificial Sequence
  Synthetic
atggccgtcaagcatctgattgtattgaaatttaaggacgagatcacggaagcacaaaaggaagaatttttcaaagcttatgttactttattgaacataatccctgctatgaaggatgtctactggggtaaggatgtgacacagaaaaacaaggaagaaggctacactcacattgtggaagttaccttcgagagcgttgaaactattcaagactacatcatccaccccgctcatgtcggattcggtgatgtctatcgttccttttgggaaaaattgttgattttcgactataccccaagaaagtaa

SEQ ID NO: 1006 - DNA, 306 bp, Artificial Sequence
  Synthetic
atggccgtcaagcatctgattgtattgaaatttaaggacgagatcacggaagcacaaaaggaagaatttttcaaaacttatgttaatttagttaacataatccctgctatgaagcaagtctactggggtaaggatgtgacacagaaaaacaaggaagaaggctacactcacattgtggaagttaccttcgagagcgttgaaactattcaagactacatcatccaccccgctcatgtcggattcggtgatgtctatcgttccttttgggaaaaattgttgattatggactataccccaagaaagtaa

SEQ ID NO: 1007 - DNA, 306 bp, Artificial Sequence
  Synthetic
atggccgtcaagcatctgattgtattgaaatttaaggacgagatcacggaagcacaaaaggaagaatttttcaaaacttatgttaatttagttaacaacatccctgctatgaaggatgtctactggggtaaggatgtgacacagaaaaacaaggaagaaggctacactcacattgtggaagttaccttcgagagcgttgaaactattcaatcctacatcatccaccccgctcatgtcgctttcggtgatgtctatcgttccttttgggaaaaattgttgattttcgactataccccaagaaagtaa

SEQ ID NO: 1008 - DNA, 306 bp, Artificial Sequence
  Synthetic
atggccgtcaagcatctgattgtattgaaatttaaggacgagatcacgaacgcacaaaaggaagaatttttcaaaacttatgttaatttagttaaccgtatccctgctatgaaggatgtctactggggtaaggatgtgacacagaaaaacaaggaagaaggctacactcacattgtggaagttaccttcgagagcgttgaaactattcaagactacatcatccaccccgctcatgtcggattcggtgatgtctatcgttccttttgggaaaaattgttgattatggactataccccaagaaagtaa

SEQ ID NO: 1009 - DNA, 306 bp, Artificial Sequence
  Synthetic
atggccgtcaagcatctgattgtattgaaatttaaggacgagatcacgaacgcacaaaaggaagaatttttcaaaacttatgttaatttagttaacataatccctgctatgaaggatgtctactggggtaaggatgtgacacagaaaaacaaggaagaaggctacactcacattgtggaagttaccttcgagagcgttgaaactattcaatcctacatcatccaccccgctcatgtcggattcggtgatgtctatcgttccttttgggaaaaattgttgattatggactataccccaagaaagtaa

SEQ ID NO: 1010 - DNA, 306 bp, Artificial Sequence
  Synthetic
atggccgtcaagcatctgattgtattgaaatttaaggacgagatcacggaagcacaaaaggaagaatttttcaaagcttatgttaatttagttaacataatccctgctatgaaggatgtctactggggtaaggatgtgacacagaaaaacaaggaagaaggctacactcacattgtggaagttaccttcgagagcgttgaaactattcaagactacatcatccaccccgctcatgtcggattcggtgatgtctatcgttccttttgggaaaaattgttgattatggactataccccaagaaagtaa

SEQ ID NO: 1011 - DNA, 306 bp, Artificial Sequence
  Synthetic
atggccgtcaagcatctgattgtattgaaatttaaggacgagatcacggaagcacaaaaggaagaatttttcaaagcttatgttaatttattgaacataatccctgctatgaagcaagtctactggggtaaggatgtgacacagaaaaacaaggaagaaggctacactcacattgtggaagttaccttcgagagcgttgaaactattcaagactacatcatccaccccgctcatgtcggattcggtgatgtctatcgttccttttgggaaaaattgttgattttcgactataccccaagaaagtaa

SEQ ID NO: 1012 - DNA, 306 bp, Artificial Sequence
  Synthetic
atggccgtcaagcatctgattgtattgaaatttaaggacgagatcacggaagatcaaaaggaagaatttttcaaacattatgttaatttagttaacataatccctgctatgaaggatgtctactggggtaaggatgtgacacagaaaaacaaggaagaaggctacactcacattgtggaagttaccttcgagagcgttgaaactattcaagactacatcatccaccccgctcatgtcggattcggtgatgtctatcgttccttttgggaaaaattgttgattttcgactataccccaagaaagtaa

SEQ ID NO: 1013 - DNA, 306 bp, Artificial Sequence
  Synthetic
atggccgtcaagcatctgattgtattgaaatttaaggacgagatcacggaagatcaaaaggaagaatttttcaaaacttatgttaatttagttaacataatccctgctatgaagcaagtctactggggtaaggatgtgacacagaaaaacaaggaagaaggctacactcacattgtggaagttaccttcgagagcgttgaaactattcaagactacatcatccaccccgctcatgtcggattcggtgatgtctatcgttccttttgggaaaaattgttgattttcgactataccccaagaaagtaa

SEQ ID NO: 1014 - DNA, 306 bp, Artificial Sequence
  Synthetic
atggccgtcaagcatctgattgtattgaaatttaaggacgagatcacggaagcacaaaaggaagaatttttcaaaacttatgttaatttagttaaccgtatccctgctatgaaggatgtctactggggtaaggatgtgacacagaaaaacaaggaagaaggctacactcacattgtggaagttaccttcgagagcgttgaaactattcaagactacatcatccaccccgctcatgtcggattcggtgctgtctatcgttccttttgggaaaaattgttgattttcgactataccccaagaaagtaa

SEQ ID NO: 1015 - DNA, 306 bp, Artificial Sequence
  Synthetic
atggccgtcaagcatctgattgtattgaaatttaaggacgagatcacggaagcacaaaaggaagaatttttcaaaacttatgttaatttagttaacataatccctgctatgaagcaagtctactggggtaaggatgtgacacagaaaaacaaggaagaaggctacactcacattgtggaagttaccttcgagagcgttgaaactattcaatcctacatcatccaccccgctcatgtcgctttcggtgatgtctatcgttccttttgggaaaaattgttgattttcgactataccccaagaaagtaa

SEQ ID NO: 1016 - DNA, 306 bp, Artificial Sequence
  Synthetic
atggccgtcaagcatctgattgtattgaaatttaaggacgagatcacggaagcacaaaaggaagaatttttcaaacattatgttaatttagttaacataatccctgctatgaaggatgtctactggggtaaggatgtgacacagaaaaacaaggaagaaggctacactcacattgtggaagttaccttcgagagcgttgaaactattcaagactacatcatccaccccgctcatgtcggattcggtaacgtctatcgttccttttgggaaaaattgttgattttcgactataccccaagaaagtaa

SEQ ID NO: 1017 - DNA, 306 bp, Artificial Sequence
  Synthetic
atggccgtcaagcatctgattgtattgaaatttaaggacgagatcacggaagcacaaaaggaagaatttttcaaaacttatgttactttagttaacataatccctgctatgaagggtgtctactggggtaaggatgtgacacagaaaaacaaggaagaaggctacactcacattgtggaagttaccttcgagagcgttgaaactattcaagactacatcatccaccccgctcatgtcggattcggtaacgtctatcgttccttttgggaaaaattgttgattttcgactataccccaagaaagtaa

SEQ ID NO: 1018 - DNA, 306 bp, Artificial Sequence
  Synthetic
atggccgtcaagcatctgattgtattgaaatttaaggacgagatcacgaacgcacaaaaggaagaatttttcaaaacttatgttaatttagttaacaacatccctgctatgaaggatgtctactggggtaaggatgtgacacagaaaaacaaggaagaaggctacactcacattgtggaagttaccttcgagagcgttgaaactattcaagactacatcatccaccccgctcatgtcggattcggtgatgtctatcgttccttttgggaaaaattgttgattatggactataccccaagaaagtaa

SEQ ID NO: 1019 - DNA, 306 bp, Artificial Sequence; identical to SEQ ID NO: 3
  Synthetic

SEQ ID NO: 1020 - DNA, 306 bp, Artificial Sequence
  Synthetic
atggccgtcaagcatctgattgtattgaaatttaaggacgagatcacggaagcacaaaaggaagaatttttcaaaacttatgttactttagttaacataatccctgctatgaagggtgtctactggggtaaggatgtgacacagaaaaacaaggaagaaggctacactcacattgtggaagttaccttcgagagcgttgaaactattcaagactacatcatccaccccgctcatgtcggattcggtgatgtctatcgttccttttgggaaaaattgttgattttcgactataccccaagaaagtaa

SEQ ID NO: 1021 - DNA, 306 bp, Artificial Sequence
  Synthetic
atggccgtcaagcatctgattgtattgaaatttaaggacgagatcacggaagcacaaaaggaagaatttttcaaaacttatgttaatttagttaacataatccctgctatgaagggtgtctactggggtaaggatgtgacacagaaaaacaaggaagaaggctacactcacattgtggaagttaccttcgagagcgttgaaactattcaatcctacatcatccaccccgctcatgtcggattcggtgatttctatcgttccttttgggaaaaattgttgattttcgactataccccaagaaagtaa

SEQ ID NO: 1022 - DNA, 306 bp, Artificial Sequence
  Synthetic
atggccgtcaagcatctgattgtattgaaatttaaggacgagatcacggaagatcaaaaggaagaatttttcaaaacttatgttaatttattgaacataatccctgctatgaagggtgtctactggggtaaggatgtgacacagaaaaacaaggaagaaggctacactcacattgtggaagttaccttcgagagcgttgaaactattcaagactacatcatccaccccgctcatgtcggattcggtgatgtctatcgttccttttgggaaaaattgttgattttcgactataccccaagaaagtaa

SEQ ID NO: 1023 - DNA, 306 bp, Artificial Sequence
  Synthetic
atggccgtcaagcatctgattgtattgaaatttaaggacgagatcacggaagatcaaaaggaagaatttttcaaaacttatgttaatttagttaacataatccctgctttgaaggatgtctactggggtaaggatgtgacacagaaaaacaaggaagaaggctacactcacattgtggaagttaccttcgagagcgttgaaactattcaagactacatcatccaccccgctcatgtcggattcggtgatgtctatcgttccttttgggaaaaattgttgattttcgactataccccaagaaagtaa

SEQ ID NO: 1024 - DNA, 306 bp, Artificial Sequence
  Synthetic
atggccgtcaagcatctgattgtattgaaatttaaggacgagatcacgaacgatcaaaaggaagaatttttcaaaacttatgttaatttagttaacaacatccctgctatgaaggatgtctactggggtaaggatgtgacacagaaaaacaaggaagaaggctacactcacattgtggaagttaccttcgagagcgttgaaactattcaagactacatcatccaccccgctcatgtcggattcggtgatgtctatcgttccttttgggaaaaattgttgattttcgactataccccaagaaagtaa

SEQ ID NO: 1025 - DNA, 306 bp, Artificial Sequence
  Synthetic
atggccgtcaagcatctgattgtattgaaatttaaggacgagatcacggaagatcaaaaggaagaatttttcaaaacttatgttaatttagttaaccgtatccctgctatgaagggtgtctactggggtaaggatgtgacacagaaaaacaaggaagaaggctacactcacattgtggaagttaccttcgagagcgttgaaactattcaagactacatcatccaccccgctcatgtcggattcggtgatgtctatcgttccttttgggaaaaattgttgattttcgactataccccaagaaagtaa

SEQ ID NO: 1026 - DNA, 306 bp, Artificial Sequence
  Synthetic
atggccgtcaagcatctgattgtattgaaatttaaggacgagatcacggaagcacaaaaggaagaatttttcaaaacttatgttaatttattgaacataatccctgctatgaagggtgtctactggggtaaggatgtgacacagaaaaacaaggaagaaggctacactcacattgtggaagttaccttcgagagcgttgaaactattcaagactacatcatccaccccgctcatgtcggattcggtgatttctatcgttccttttgggaaaaattgttgattttcgactataccccaagaaagtaa

SEQ ID NO: 1027 - DNA, 306 bp, Artificial Sequence
  Synthetic
atggccgtcaagcatctgattgtattgaaatttaaggacgagatcacgaacgcacaaaaggaagaatttttcaaagcttatgttaatttagttaacataatccctgctttgaaggatgtctactggggtaaggatgtgacacagaaaaacaaggaagaaggctacactcacattgtggaagttaccttcgagagcgttgaaactattcaagactacatcatccaccccgctcatgtcggattcggtgatgtctatcgttccttttgggaaaaattgttgattttcgactataccccaagaaagtaa

SEQ ID NO: 1028 - DNA, 306 bp, Artificial Sequence
  Synthetic
atggccgtcaagcatctgattgtattgaaatttaaggacgagatcacggaagcacaaaaggaagaatttttcaaaacttatgttaatttagttaacataatccctgctatgaagcaagtctactggggtaaggatgtgacacagaaaaacaaggaagaaggctacactcacattgtggaagttaccttcgagagcgttgaaactattcaatcctacatcatccaccccgctcatgtcggattcggtgctgtctatcgttccttttgggaaaaattgttgattttcgactataccccaagaaagtaa

SEQ ID NO: 1029 - DNA, 306 bp, Artificial Sequence
  Synthetic
atggccgtcaagcatctgattgtattgaaatttaaggacgagatcacgaacgatcaaaaggaagaatttttcaaaacttatgttaatttagttaacataatccctgctatgaagggtgtctactggggtaaggatgtgacacagaaaaacaaggaagaaggctacactcacattgtggaagttaccttcgagagcgttgaaactattcaagactacatcatccaccccgctcatgtcggattcggtgatgtctatcgttccttttgggaaaaattgttgattttcgactataccccaagaaagtaa

SEQ ID NO: 1030 - DNA, 306 bp, Artificial Sequence
  Synthetic
atggccgtcaagcatctgattgtattgaaatttaaggacgagatcacggaagcacaaaaggaagaatttttcaaaacttatgttaatttagttaaccatatccctgctatgaagggtgtctactggggtaaggatgtgacacagaaaaacaaggaagaaggctacactcacattgtggaagttaccttcgagagcgttgaaactattcaagactacatcatccaccccgctcatgtcggattcggtcaagtctatcgttccttttgggaaaaattgttgattttcgactataccccaagaaagtaa

SEQ ID NO: 1031 - DNA, 306 bp, Artificial Sequence
  Synthetic
atggccgtcaagcatctgattgtattgaaatttaaggacgagatcacggaagcacaaaaggaagaatttttcaaagcttatgttactttagttaaccgtatccctgctatgaaggatgtctactggggtaaggatgtgacacagaaaaacaaggaagaaggctacactcacattgtggaagttaccttcgagagcgttgaaactattcaagactacatcatccaccccgctcatgtcggattcggtgatgtctatcgttccttttgggaaaaattgttgattttcgactataccccaagaaagtaa

SEQ ID NO: 1032 - DNA, 306 bp, Artificial Sequence
  Synthetic
atggccgtcaagcatctgattgtattgaaatttaaggacgagatcacggaagcacaaaaggaagaatttttcaaacattatgttaatttagttaaccatatccctgctatgaaggatgtctactggggtaaggatgtgacacagaaaaacaaggaagaaggctacactcacattgtggaagttaccttcgagagcgttgaaactattcaagactacatcatccaccccgctcatgtcggattcggtcaagtctatcgttccttttgggaaaaattgttgattttcgactataccccaagaaagtaa

SEQ ID NO: 1033 - DNA, 306 bp, Artificial Sequence
  Synthetic
atggccgtcaagcatctgattgtattgaaatttaaggacgagatcacggaagatcaaaaggaagaatttttcaaaacttatgttaatttagttaacataatccctgctatgaaggatgtctactggggtaaggatgtgacacagaaaaacaaggaagaaggctacactcacattgtggaagttaccttcgagagcgttgaaactattcaatcctacatcatccaccccgctcatgtcgctttcggtgatgtctatcgttccttttgggaaaaattgttgattttcgactataccccaagaaagtaa

SEQ ID NO: 1034 - DNA, 306 bp, Artificial Sequence
  Synthetic
atggccgtcaagcatctgattgtattgaaatttaaggacgagatcacggaagcacaaaaggaagaatttttcaaaacttatgttactttagttaacaacatccctgctatgaaggatgtctactggggtaaggatgtgacacagaaaaacaaggaagaaggctacactcacattgtggaagttaccttcgagagcgttgaaactattcaagactacatcatccaccccgctcatgtcggattcggtgatgtctatcgttccttttgggaaaaattgttgattttcgactataccccaagaaagtaa

SEQ ID NO: 1035 - DNA, 306 bp, Artificial Sequence
  Synthetic
atggccgtcaagcatctgattgtattgaaatttaaggacgagatcacggaagcacaaaaggaagaatttttcaaaacttatgttaatttattgaaccgtatccctgctatgaaggatgtctactggggtaaggatgtgacacagaaaaacaaggaagaaggctacactcacattgtggaagttaccttcgagagcgttgaaactattcaagactacatcatccaccccgctcatgtcggattcggtaacgtctatcgttccttttgggaaaaattgttgattttcgactataccccaagaaagtaa

SEQ ID NO: 1036 - DNA, 306 bp, Artificial Sequence
  Synthetic
atggccgtcaagcatctgattgtattgaaatttaaggacgagatcacgaacgcacaaaaggaagaatttttcaaacattatgttaatttagttaacataatccctgctttgaaggatgtctactggggtaaggatgtgacacagaaaaacaaggaagaaggctacactcacattgtggaagttaccttcgagagcgttgaaactattcaagactacatcatccaccccgctcatgtcggattcggtgatgtctatcgttccttttgggaaaaattgttgattttcgactataccccaagaaagtaa

SEQ ID NO: 1037 - skipped

SEQ ID NO: 1038 - DNA, 306 bp, Artificial Sequence
  Synthetic
atggccgtcaagcatctgattgtattgaaatttaaggacgagatcacggaagcacaaaaggaagaatttttcaaaacttatgttaatttagttaaccgtatccctgctatgaaggatgtctactggggtaaggatgtgacacagaaaaacaaggaagaaggctacactcacattgtggaagttaccttcgagagcgttgaaactattcaagactacatcatccaccccgctcatgtcggattcggtgatgtctatcgttccttttgggaaaaattgttgattatggactataccccaagaaagtaa

SEQ ID NO: 1039 - DNA, 306 bp, Artificial Sequence
  Synthetic
atggccgtcaagcatctgattgtattgaaatttaaggacgagatcacggaagcacaaaaggaagaatttttcaaaacttatgttaatttagttaaccatatccctgctatgaagcaagtctactggggtaaggatgtgacacagaaaaacaaggaagaaggctacactcacattgtggaagttaccttcgagagcgttgaaactattcaatcctacatcatccaccccgctcatgtcggattcggtgatgtctatcgttccttttgggaaaaattgttgattttcgactataccccaagaaagtaa

SEQ ID NO: 1040 - DNA, 306 bp, Artificial Sequence
  Synthetic
atggccgtcaagcatctgattgtattgaaatttaaggacgagatcacggaagcacaaaaggaagaatttttcaaaacttatgttaatttagttaacaacatccctgctatgaagcaagtctactggggtaaggatgtgacacagaaaaacaaggaagaaggctacactcacattgtggaagttaccttcgagagcgttgaaactattcaagactacatcatccaccccgctcatgtcggattcggtgatgtctatcgttccttttgggaaaaattgttgattatggactataccccaagaaagtaa

SEQ ID NO: 1041 - DNA, 306 bp, Artificial Sequence
  Synthetic
atggccgtcaagcatctgattgtattgaaatttaaggacgagatcacggaagatcaaaaggaagaatttttcaaaacttatgttaatttagttaacataatccctgctatgaagcaagtctactggggtaaggatgtgacacagaaaaacaaggaagaaggctacactcacattgtggaagttaccttcgagagcgttgaaactattcaagactacatcatccaccccgctcatgtcggattcggtgatttctatcgttccttttgggaaaaattgttgattttcgactataccccaagaaagtaa

SEQ ID NO: 1042 - DNA, 306 bp, Artificial Sequence
  Synthetic
atggccgtcaagcatctgattgtattgaaatttaaggacgagatcacggaagcacaaaaggaagaatttttcaaagcttatgttactttagttaaccatatccctgctatgaaggatgtctactggggtaaggatgtgacacagaaaaacaaggaagaaggctacactcacattgtggaagttaccttcgagagcgttgaaactattcaagactacatcatccaccccgctcatgtcggattcggtgatgtctatcgttccttttgggaaaaattgttgattttcgactataccccaagaaagtaa

SEQ ID NO: 1043 - DNA, 306 bp, Artificial Sequence
  Synthetic
atggccgtcaagcatctgattgtattgaaatttaaggacgagatcacggaagcacaaaaggaagaatttttcaaaacttatgttactttagttaaccgtatccctgctatgaagcaagtctactggggtaaggatgtgacacagaaaaacaaggaagaaggctacactcacattgtggaagttaccttcgagagcgttgaaactattcaagactacatcatccaccccgctcatgtcggattcggtgatgtctatcgttccttttgggaaaaattgttgattttcgactataccccaagaaagtaa

SEQ ID NO: 1044 - DNA, 306 bp, Artificial Sequence
  Synthetic
atggccgtcaagcatctgattgtattgaaatttaaggacgagatcacgaacgcacaaaaggaagaatttttcaaaacttatgttaatttagttaacataatccctgctatgaaggatgtctactggggtaaggatgtgacacagaaaaacaaggaagaaggctacactcacattgtggaagttaccttcgagagcgttgaaactattcaagactacatcatccaccccgctcatgtcggattcggtaacgtctatcgttccttttgggaaaaattgttgattatggactataccccaagaaagtaa

SEQ ID NO: 1045 - DNA, 306 bp, Artificial Sequence
  Synthetic
atggccgtcaagcatctgattgtattgaaatttaaggacgagatcacggaagcacaaaaggaagaatttttcaaaacttatgttactttattgaacataatccctgctatgaaggatgtctactggggtaaggatgtgacacagaaaaacaaggaagaaggctacactcacattgtggaagttaccttcgagagcgttgaaactattcaagactacatcatccaccccgctcatgtcggattcggtgatgtctatcgttccttttgggaaaaattgttgattttcgactataccccaagaaagtaa

SEQ ID NO: 1046 - DNA, 306 bp, Artificial Sequence
  Synthetic
atggccgtcaagcatctgattgtattgaaatttaaggacgagatcacgaacgcacaaaaggaagaatttttcaaaacttatgttaatttattgaacaacatccctgctatgaaggatgtctactggggtaaggatgtgacacagaaaaacaaggaagaaggctacactcacattgtggaagttaccttcgagagcgttgaaactattcaagactacatcatccaccccgctcatgtcggattcggtgatgtctatcgttccttttgggaaaaattgttgattttcgactataccccaagaaagtaa

SEQ ID NO: 1047 - DNA, 306 bp, Artificial Sequence
  Synthetic
atggccgtcaagcatctgattgtattgaaatttaaggacgagatcacgaacgcacaaaaggaagaatttttcaaaacttatgttaatttagttaacataatccctgctatgaaggatgtctactggggtaaggatgtgacacagaaaaacaaggaagaaggctacactcacattgtggaagttaccttcgagagcgttgaaactattcaagactacatcatccaccccgctcatgtcgctttcggtaacgtctatcgttccttttgggaaaaattgttgattttcgactataccccaagaaagtaa

SEQ ID NO: 1048 - DNA, 306 bp, Artificial Sequence
  Synthetic
atggccgtcaagcatctgattgtattgaaatttaaggacgagatcacggaagcacaaaaggaagaatttttcaaaacttatgttaatttattgaacataatccctgctatgaaggatgtctactggggtaaggatgtgacacagaaaaacaaggaagaaggctacactcacattgtggaagttaccttcgagagcgttgaaactattcaatcctacatcatccaccccgctcatgtcggattcggtaacgtctatcgttccttttgggaaaaattgttgattttcgactataccccaagaaagtaa

SEQ ID NO: 1049 - DNA, 306 bp, Artificial Sequence
  Synthetic
atggccgtcaagcatctgattgtattgaaatttaaggacgagatcacgaacgcacaaaaggaagaatttttcaaagcttatgttaatttagttaacataatccctgctatgaaggatgtctactggggtaaggatgtgacacagaaaaacaaggaagaaggctacactcacattgtggaagttaccttcgagagcgttgaaactattcaagactacatcatccaccccgctcatgtcgctttcggtgatgtctatcgttccttttgggaaaaattgttgattttcgactataccccaagaaagtaa

SEQ ID NO: 1050 - DNA, 306 bp, Artificial Sequence
  Synthetic
atggccgtcaagcatctgattgtattgaaatttaaggacgagatcacggaagcacaaaaggaagaatttttcaaaacttatgttaatttagttaaccgtatccctgctatgaagggtgtctactggggtaaggatgtgacacagaaaaacaaggaagaaggctacactcacattgtggaagttaccttcgagagcgttgaaactattcaatcctacatcatccaccccgctcatgtcggattcggtgatgtctatcgttccttttgggaaaaattgttgattttcgactataccccaagaaagtaa

SEQ ID NO: 1051 - DNA, 306 bp, Artificial Sequence
  Synthetic
atggccgtcaagcatctgattgtattgaaatttaaggacgagatcacggaagatcaaaaggaagaatttttcaaacattatgttaatttagttaacataatccctgctatgaagcaagtctactggggtaaggatgtgacacagaaaaacaaggaagaaggctacactcacattgtggaagttaccttcgagagcgttgaaactattcaagactacatcatccaccccgctcatgtcggattcggtgatgtctatcgttccttttgggaaaaattgttgattttcgactataccccaagaaagtaa

SEQ ID NO: 1052 - DNA, 306 bp, Artificial Sequence
  Synthetic
atggccgtcaagcatctgattgtattgaaatttaaggacgagatcacggaagcacaaaaggaagaatttttcaaaacttatgttaatttagttaaccgtatccctgctatgaagggtgtctactggggtaaggatgtgacacagaaaaacaaggaagaaggctacactcacattgtggaagttaccttcgagagcgttgaaactattcaagactacatcatccaccccgctcatgtcggattcggtgatgtctatcgttccttttgggaaaaattgttgattatggactataccccaagaaagtaa

SEQ ID NO: 1053 - DNA, 306 bp, Artificial Sequence
  Synthetic
atggccgtcaagcatctgattgtattgaaatttaaggacgagatcacggaagcacaaaaggaagaatttttcaaaacttatgttaatttagttaacataatccctgctatgaagggtgtctactggggtaaggatgtgacacagaaaaacaaggaagaaggctacactcacattgtggaagttaccttcgagagcgttgaaactattcaatcctacatcatccaccccgctcatgtcggattcggtgatgtctatcgttccttttgggaaaaattgttgattttcgactataccccaagaaagtaa

SEQ ID NO: 1054 - DNA, 306 bp, Artificial Sequence
  Synthetic
atggccgtcaagcatctgattgtattgaaatttaaggacgagatcacggaagcacaaaaggaagaatttttcaaaacttatgttaatttattgaaccgtatccctgctatgaaggatgtctactggggtaaggatgtgacacagaaaaacaaggaagaaggctacactcacattgtggaagttaccttcgagagcgttgaaactattcaagactacatcatccaccccgctcatgtcggattcggtgatgtctatcgttccttttgggaaaaattgttgattttcgactataccccaagaaagtaa

SEQ ID NO: 1055 - DNA, 306 bp, Artificial Sequence
  Synthetic
atggccgtcaagcatctgattgtattgaaatttaaggacgagatcacggaagcacaaaaggaagaatttttcaaacattatgttactttagttaacataatccctgctatgaaggatgtctactggggtaaggatgtgacacagaaaaacaaggaagaaggctacactcacattgtggaagttaccttcgagagcgttgaaactattcaagactacatcatccaccccgctcatgtcggattcggtgatttctatcgttccttttgggaaaaattgttgattttcgactataccccaagaaagtaa

SEQ ID NO: 1056 - DNA, 306 bp, Artificial Sequence
  Synthetic
atggccgtcaagcatctgattgtattgaaatttaaggacgagatcacgaacgcacaaaaggaagaatttttcaaacattatgttactttagttaacataatccctgctatgaaggatgtctactggggtaaggatgtgacacagaaaaacaaggaagaaggctacactcacattgtggaagttaccttcgagagcgttgaaactattcaagactacatcatccaccccgctcatgtcggattcggtgatgtctatcgttccttttgggaaaaattgttgattttcgactataccccaagaaagtaa

SEQ ID NO: 1057 - DNA, 306 bp, Artificial Sequence
  Synthetic
atggccgtcaagcatctgattgtattgaaatttaaggacgagatcacgaacgcacaaaaggaagaatttttcaaaacttatgttaatttagttaacataatccctgctttgaaggatgtctactggggtaaggatgtgacacagaaaaacaaggaagaaggctacactcacattgtggaagttaccttcgagagcgttgaaactattcaagactacatcatccaccccgctcatgtcggattcggtcaagtctatcgttccttttgggaaaaattgttgattttcgactataccccaagaaagtaa

SEQ ID NO: 1058 - DNA, 306 bp, Artificial Sequence
  Synthetic
atggccgtcaagcatctgattgtattgaaatttaaggacgagatcacggaagcacaaaaggaagaatttttcaaaacttatgttactttagttaacaacatccctgctatgaaggatgtctactggggtaaggatgtgacacagaaaaacaaggaagaaggctacactcacattgtggaagttaccttcgagagcgttgaaactattcaagactacatcatccaccccgctcatgtcggattcggtcaagtctatcgttccttttgggaaaaattgttgattttcgactataccccaagaaagtaa

SEQ ID NO: 1059 - DNA, 306 bp, Artificial Sequence
  Synthetic
atggccgtcaagcatctgattgtattgaaatttaaggacgagatcacggaagcacaaaaggaagaatttttcaaacattatgttaatttagttaacataatccctgctatgaagcaagtctactggggtaaggatgtgacacagaaaaacaaggaagaaggctacactcacattgtggaagttaccttcgagagcgttgaaactattcaagactacatcatccaccccgctcatgtcggattcggtcaagtctatcgttccttttgggaaaaattgttgattttcgactataccccaagaaagtaa

SEQ ID NO: 1060 - DNA, 306 bp, Artificial Sequence
  Synthetic
atggccgtcaagcatctgattgtattgaaatttaaggacgagatcacgaacgcacaaaaggaagaatttttcaaaacttatgttaatttagttaacataatccctgctatgaagggtgtctactggggtaaggatgtgacacagaaaaacaaggaagaaggctacactcacattgtggaagttaccttcgagagcgttgaaactattcaagactacatcatccaccccgctcatgtcggattcggtgctgtctatcgttccttttgggaaaaattgttgattttcgactataccccaagaaagtaa

SEQ ID NO: 1061 - DNA, 306 bp, Artificial Sequence
  Synthetic
atggccgtcaagcatctgattgtattgaaatttaaggacgagatcacggaagcacaaaaggaagaatttttcaaacattatgttaatttagttaacataatccctgctatgaagggtgtctactggggtaaggatgtgacacagaaaaacaaggaagaaggctacactcacattgtggaagttaccttcgagagcgttgaaactattcaagactacatcatccaccccgctcatgtcggattcggtgatttctatcgttccttttgggaaaaattgttgattttcgactataccccaagaaagtaa

SEQ ID NO: 1062 - DNA, 306 bp, Artificial Sequence
  Synthetic
atggccgtcaagcatctgattgtattgaaatttaaggacgagatcacggaagatcaaaaggaagaatttttcaaaacttatgttaatttagttaacataatccctgctatgaagcaagtctactggggtaaggatgtgacacagaaaaacaaggaagaaggctacactcacattgtggaagttaccttcgagagcgttgaaactattcaatcctacatcatccaccccgctcatgtcggattcggtgatgtctatcgttccttttgggaaaaattgttgattttcgactataccccaagaaagtaa

SEQ ID NO: 1063 - DNA, 306 bp, Artificial Sequence
  Synthetic
atggccgtcaagcatctgattgtattgaaatttaaggacgagatcacgaacgcacaaaaggaagaatttttcaaaacttatgttaatttagttaaccatatccctgctatgaaggatgtctactggggtaaggatgtgacacagaaaaacaaggaagaaggctacactcacattgtggaagttaccttcgagagcgttgaaactattcaatcctacatcatccaccccgctcatgtcggattcggtgatgtctatcgttccttttgggaaaaattgttgattttcgactataccccaagaaagtaa

SEQ ID NO: 1064 - DNA, 306 bp, Artificial Sequence
  Synthetic
atggccgtcaagcatctgattgtattgaaatttaaggacgagatcacgaacgcacaaaaggaagaatttttcaaagcttatgttaatttagttaacataatccctgctatgaagggtgtctactggggtaaggatgtgacacagaaaaacaaggaagaaggctacactcacattgtggaagttaccttcgagagcgttgaaactattcaagactacatcatccaccccgctcatgtcggattcggtgatgtctatcgttccttttgggaaaaattgttgattttcgactataccccaagaaagtaa

SEQ ID NO: 1065 - DNA, 306 bp, Artificial Sequence
  Synthetic
atggccgtcaagcatctgattgtattgaaatttaaggacgagatcacggaagcacaaaaggaagaatttttcaaacattatgttaatttagttaacataatccctgctatgaagcaagtctactggggtaaggatgtgacacagaaaaacaaggaagaaggctacactcacattgtggaagttaccttcgagagcgttgaaactattcaagactacatcatccaccccgctcatgtcggattcggtgatgtctatcgttccttttgggaaaaattgttgattttcgactataccccaagaaagtaa

SEQ ID NO: 1066 - DNA, 306 bp, Artificial Sequence
  Synthetic
atggccgtcaagcatctgattgtattgaaatttaaggacgagatcacggaagcacaaaaggaagaatttttcaaaacttatgttactttattgaacataatccctgctatgaagcaagtctactggggtaaggatgtgacacagaaaaacaaggaagaaggctacactcacattgtggaagttaccttcgagagcgttgaaactattcaagactacatcatccaccccgctcatgtcggattcggtgatgtctatcgttccttttgggaaaaattgttgattttcgactataccccaagaaagtaa

SEQ ID NO: 1067 - DNA, 306 bp, Artificial Sequence
  Synthetic
atggccgtcaagcatctgattgtattgaaatttaaggacgagatcacggaagatcaaaaggaagaatttttcaaaacttatgttactttattgaacataatccctgctatgaaggatgtctactggggtaaggatgtgacacagaaaaacaaggaagaaggctacactcacattgtggaagttaccttcgagagcgttgaaactattcaagactacatcatccaccccgctcatgtcggattcggtgatgtctatcgttccttttgggaaaaattgttgattttcgactataccccaagaaagtaa

SEQ ID NO: 1068 - DNA, 306 bp, Artificial Sequence
  Synthetic
atggccgtcaagcatctgattgtattgaaatttaaggacgagatcacggaagatcaaaaggaagaatttttcaaacattatgttaatttagttaacataatccctgctatgaaggatgtctactggggtaaggatgtgacacagaaaaacaaggaagaaggctacactcacattgtggaagttaccttcgagagcgttgaaactattcaagactacatcatccaccccgctcatgtcggattcggtgatgtctatcgttccttttgggaaaaattgttgattatggactataccccaagaaagtaa

SEQ ID NO: 1069 - DNA, 306 bp, Artificial Sequence
  Synthetic
atggccgtcaagcatctgattgtattgaaatttaaggacgagatcacggaagcacaaaaggaagaatttttcaaaacttatgttaatttattgaacataatccctgctatgaagggtgtctactggggtaaggatgtgacacagaaaaacaaggaagaaggctacactcacattgtggaagttaccttcgagagcgttgaaactattcaagactacatcatccaccccgctcatgtcggattcggtgatgtctatcgttccttttgggaaaaattgttgattatggactataccccaagaaagtaa

SEQ ID NO: 1070 - DNA, 306 bp, Artificial Sequence
  Synthetic
atggccgtcaagcatctgattgtattgaaatttaaggacgagatcacggaagcacaaaaggaagaatttttcaaaacttatgttaatttattgaaccatatccctgctatgaaggatgtctactggggtaaggatgtgacacagaaaaacaaggaagaaggctacactcacattgtggaagttaccttcgagagcgttgaaactattcaatcctacatcatccaccccgctcatgtcggattcggtgatgtctatcgttccttttgggaaaaattgttgattttcgactataccccaagaaagtaa

SEQ ID NO: 1071 - DNA, 306 bp, Artificial Sequence
  Synthetic
atggccgtcaagcatctgattgtattgaaatttaaggacgagatcacgaacgcacaaaaggaagaatttttcaaaacttatgttaatttagttaacataatccctgctatgaagggtgtctactggggtaaggatgtgacacagaaaaacaaggaagaaggctacactcacattgtggaagttaccttcgagagcgttgaaactattcaagactacatcatccaccccgctcatgtcggattcggtgatgtctatcgttccttttgggaaaaattgttgattttcgactataccccaagaaagtaa

SEQ ID NO: 1072 - DNA, 306 bp, Artificial Sequence
  Synthetic
atggccgtcaagcatctgattgtattgaaatttaaggacgagatcacgaacgatcaaaaggaagaatttttcaaaacttatgttactttattgaacataatccctgctatgaagcaagtctactggggtaaggatgtgacacagaaaaacaaggaagaaggctacactcacattgtggaagttaccttcgagagcgttgaaactattcaatcctacatcatccaccccgctcatgtcggattcggtgatgtctatcgttccttttgggaaaaattgttgattttcgactataccccaagaaagtaa

SEQ ID NO: 1073 - DNA, 306 bp, Artificial Sequence
  Synthetic
atggccgtcaagcatctgattgtattgaaatttaaggacgagatcacgaacgcacaaaaggaagaatttttcaaaacttatgttactttattgaacataatccctgctatgaagcaagtctactggggtaaggatgtgacacagaaaaacaaggaagaaggctacactcacattgtggaagttaccttcgagagcgttgaaactattcaatcctacatcatccaccccgctcatgtcggattcggtgctgtctatcgttccttttgggaaaaattgttgattttcgactataccccaagaaagtaa

SEQ ID NO: 1074 - DNA, 306 bp, Artificial Sequence
  Synthetic
atggccgtcaagcatctgattgtattgaaatttaaggacgagatcacgaacgatcaaaaggaagaatttttcaaaacttatgttaatttattgaacataatccctgctatgaagcaagtctactggggtaaggatgtgacacagaaaaacaaggaagaaggctacactcacattgtggaagttaccttcgagagcgttgaaactattcaatcctacatcatccaccccgctcatgtcggattcggtgctgtctatcgttccttttgggaaaaattgttgattttcgactataccccaagaaagtaa

SEQ ID NO: 1075 - DNA, 306 bp, Artificial Sequence
  Synthetic
atggccgtcaagcatctgattgtattgaaatttaaggacgagatcacggaagatcaaaaggaagaatttttcaaaacttatgttactttattgaacataatccctgctatgaagcaagtctactggggtaaggatgtgacacagaaaaacaaggaagaaggctacactcacattgtggaagttaccttcgagagcgttgaaactattcaatcctacatcatccaccccgctcatgtcggattcggtgctgtctatcgttccttttgggaaaaattgttgattttcgactataccccaagaaagtaa

SEQ ID NO: 1076 - DNA, 306 bp, Artificial Sequence
  Synthetic
atggccgtcaagcatctgattgtattgaaatttaaggacgagatcacgaacgatcaaaaggaagaatttttcaaaacttatgttactttattgaacataatccctgctatgaagcaagtctactggggtaaggatgtgacacagaaaaacaaggaagaaggctacactcacattgtggaagttaccttcgagagcgttgaaactattcaagactacatcatccaccccgctcatgtcggattcggtgctgtctatcgttccttttgggaaaaattgttgattttcgactataccccaagaaagtaa

SEQ ID NO: 1077 - DNA, 306 bp, Artificial Sequence
  Synthetic
atggccgtcaagcatctgattgtattgaaatttaaggacgagatcacgaacgatcaaaaggaagaatttttcaaaacttatgttactttagttaacataatccctgctatgaagcaagtctactggggtaaggatgtgacacagaaaaacaaggaagaaggctacactcacattgtggaagttaccttcgagagcgttgaaactattcaatcctacatcatccaccccgctcatgtcggattcggtgctgtctatcgttccttttgggaaaaattgttgattttcgactataccccaagaaagtaa

SEQ ID NO: 1078 - DNA, 306 bp, Artificial Sequence
  Synthetic
atggcagtcaagcatctaatcgttttaaaatttaaggatgaaattacggaggctcaaaaagaagaatttttcaagacatacgtaaatcttgttaacataatcccagccatgaaggacgtgtattggggtaaagatgtcactcagaagaacaaggaagaaggctacactcacattgttgaggtcaccttcgaaagcgttgaaaccatccaagaatacattatccaccccgctcatgttggtttcggtgatgtctatagatcattctgggaaaaattgttgatttttgactacactcctcgtaagtaa

SEQ ID NO: 1079 - DNA, 306 bp, Artificial Sequence
  Synthetic
atggcagtcaagcatctaatcgttttaaaatttaaggatgaaattacggaggctcaaaaagaagaatttttcaagacatacgtaaatcttgttaacataatcccagccatgaaggacgtgtattggggtaaagatgtcactcagaagaacaaggaagaaggctacactcacattgttgaggtcaccttcgaaagcgttgaaaccatccaagaatacattatccaccccgctcatgttgacttcggtgatgtctatagatcattctgggaaaaattgttgatttttgactacactccttctaagtaa

SEQ ID NO: 1080 - DNA, 306 bp, Artificial Sequence
  Synthetic
atggcagtcaagcatctaatcgttttaaaatttaaggatgaaattacggaggctcaaaaagaagaatttttcaagacatacgtaaatcttgttaacataatcccagccatgaaggacgtgtattggggtaaagatgtcactcagaagaacaaggaagaaggcttcactcacattgttgaggtcaccttcgaaagcgttgaaaccatccaagactacattatccaccccgctcatgttgctttcggtaaggtctatagatcattctgggaaaaattgttgatttttgactacactcctcgtaagtaa

SEQ ID NO: 1081 - DNA, 306 bp, Artificial Sequence
  Synthetic
atggcagtcaagcatctaatcgttttaaaatttaaggatgaaattacggaggctcaaaaagaagaatttttcaagacatacgtaaatcttgttaacataatcccagccatgaaggacgtgtattggggtaaagatgtcactcagaagaacaaggaagaaggctacactcacattgttgaggtcaccttcgacagcgttgaaaccatccaagaatacattatccaccccgctcatgttggtttcggtgatgtctatagatcattctgggaaaaattgttgatttttgactacactcctcgtaagtaa

SEQ ID NO: 1082 - DNA, 306 bp, Artificial Sequence
  Synthetic
atggcagtcaagcatctaatcgttttaaaatttaaggatgaaattacggaggctcaaaaagaagaatttttcaagacatacgtaaatcttgttaacataatcccagccatgaaggacgtgtattggggtaaagatgtcactcagaagaacaaggaagaaggctacactcacattgttgaggtcaccttcgaaagctatgaaaccatccaagactacattatccaccccgctcatgttggtttcggtgatgtctatagatcattctgggaaaaattgttgatttttgactacactcctcgtaagtaa

SEQ ID NO: 1083 - DNA, 306 bp, Artificial Sequence
  Synthetic
atggcagtcaagcatctaatcgttttaaaatttaaggatgaaattacggaggctcaaaaagaagaatttttcaagacatacgtaaatcttgttaacataatcccagccatgaaggacgtgtattggggtaaagatgtcactcagaagaacaaggaagaaggctacactcacattgttgaggtcaccttcgaaagcgttgaaaccatccaagactacattatccaccccgctcatgttggtttcggtgatgtctatagatcattctgggaaaaattgttgattatagactacactcctcgtaagtaa

SEQ ID NO: 1084 - DNA, 306 bp, Artificial Sequence
  Synthetic
atggcagtcaagcatctaatcgttttaaaatttaaggatgaaattacggaggctcaaaaagaagaatttttcaagacatacgtaaatcttgttaacataatcccagccatgaaggacgtgtattggggtaaagatgtcactcagaagaacaaggaagaaggctacactcacattgttgaggtcaccttcgaaagcgttgaaaccatccaagactacattatccaccccgctcatgttggtttcagagatgtctatagatcattctgggaaaaattgttgatttttgactacactcctcgtaagtaa

SEQ ID NO: 1085 - DNA, 306 bp, Artificial Sequence
  Synthetic
atggcagtcaagcatctaatcgttttaaaatttaaggatgaaattacggaggctcaaaaagaagaatttttcaagacatacgtaaatcttgttaacataatcccagccatgaaggacgtgtattggggtaaagatgtcactcagaagaacaaggaagaaggctacactcacattgttgaggtcaccttcgaaagcgttgaaaccatccaagactacattatccaccccgctcatgttggtttcggtgatgtctatagatcattctgggaaaaattgttgatttttgactacactcctcgtgcttaa

SEQ ID NO: 1086 - DNA, 306 bp, Artificial Sequence
  Synthetic
atggcagtcaagcatctaatcgttttaaaatttaaggatgaaattacggaggctcaaaaagaagaatttttcaagacatacgtaaatcttgttaacataatcccagccatgaaggacgtgtattggggtaaagatgtcactcagaagtggaaggaagaaggctacactcacattgttgaggtcaccttcgaaagcgttgaaaccatccaagactacattatccaccccgctcatgttggtttcggtgatgtctatagatcattctgggaaaaattgttgatttttgactacactcctcgtaagtaa

SEQ ID NO: 1087 - DNA, 306 bp, Artificial Sequence
  Synthetic
atggcagtcaagcatctaatcgttttaaaatttaaggatgaaattacggaggctcaaaaagaagaatttttcaagacatacgtaaatcttgttaacataatcccagccatgaaggacgtgtattggggtaaagatgtcactgctaagaacaaggaagaaggctacactcacattgttgaggtcaccttcgaaagcgttgaaaccatccaagactacattatccaccccgctcatgttggtttcggtgatgtctatagatcattctgggaaaaattgttgatttttgactacactcctcgtaagtaa

SEQ ID NO: 1088 - DNA, 306 bp, Artificial Sequence
  Synthetic
atggcagtcaagcatctaatcgttttaaaatttaaggatgaaattacggaggctcaaaaagaagaatttttcaagacatacgtaaatcttgttaacataatcccagccatgaaggacgtgtattggggtaaagatgtcactcagaagaacaaggaagaaggctacactcacattgttgaggtcaccttcgaaagcgttgaaaccatccaagactacattatccaccccgctcatgttggtttcggtgatgtctatagatcattctgggaaaaattgttgatttttgactacactcctcaaaagtaa

SEQ ID NO: 1089 - DNA, 306 bp, Artificial Sequence
  Synthetic
atggcagtcaagcatctaatcgttttaaaatttaaggatgaaattacggaggctcaaaaagaagaatttttcaagacatacgtaaatcttgttaacataatcccagccatgaaggacgtgtattggggtaaagatgtcactcagaagaacaaggaagaaggctacactcacattgttgaggtcaccttcgaaagcgttgaaaccatccaagactacattatccaccccgctcatgttggtttcggtgatgtctatagatcattctgggaaaaattgttgatttttgactacactccttcgaagtaa

SEQ ID NO: 1090 - DNA, 306 bp, Artificial Sequence
  Synthetic
atggcagtcaagcatctaatcgttttaaaatttaaggatgaaattacggaggctcaaaaagaagaatttttcaagacatacgtaaatcttgttaacataatcccagccatgaaggacgtgtattggggtaaagatgtcactcagaagttcaaggaagaaggctacactcacattgttgaggtcaccttcgaaagcgttgaaaccatccaagactacattatccaccccgctcatgttggtttcggtgatgtctatagatcattctgggaaaaattgttgatttttgactacactcctcgtaagtaa

SEQ ID NO: 1091 - DNA, 306 bp, Artificial Sequence
  Synthetic
atggcagtcaagcatctaatcgttttaaaatttaaggatgaaattacggaggctcaaaaagaagaatttttcaagacatacgtaaatcttgttaacataatcccagccatgaaggacgtgtattggggtaaagatgtcactcagaagaacaaggaagaaggctacactcacattgttgaggtcaccttcgaaagcgttgaaaccatccaagactacattatccaccccgctcatgttggtttcggtgatgtctatagatcattctgggaaaaattgttgatttttgactacgagcctcgtaagtaa

SEQ ID NO: 1092 - DNA, 306 bp, Artificial Sequence
  Synthetic
atggcagtcaagcatctaatcgttttaaaatttaaggatgaaattacggaggctcaaaaagaagaatttttcaagacatacgtaaatcttgttaacataatcccagccatgaaggacgtgtattggggtaaagatgtcactcagaagaacaaggaagaaggctacactcacattgttgaggtcaccttcgaaagcgttgaaaccatccaagactacattatccaccccgctcatgttggtttcggtgatgtctatagatcattctgggaaaaattgttgatttttgactacaagcctcgtaagtaa

SEQ ID NO: 1093 - DNA, 306 bp, Artificial Sequence
  Synthetic
atggcagtcaagcatctaatcgttttaaaatttaaggatgaaattacggaggctcaaaaagaagaatttttcaagacatacgtaaatcttgttaacataatcccagccatgaaggacgtgtattggggtaaagatgtcactcagaagaacaaggaagaaggctacactcacattgttgaggtcaccttcgaaagcgttgaaaccatccaagactacattatccaccccgctcatgttggtttcggtgatgtctatagatcattctgggaaaaattgttgatttttgacttcactcctcgtaagtaa

SEQ ID NO: 1094 - DNA, 306 bp, Artificial Sequence
  Synthetic
atggcagtcaagcatctaatcgttttaaaatttaaggatgaaattacggaggctcaaaaagaagaatttttcaagacatacgtaaatcttgttaacataatcccagccatgaaggacgtgtattggggtaaagatgtcactcagaagaacaaggaagaaggctacactcacattgttgaggtcaccttcgaaagcgttgaaaccatccaagactacattatccaccccgctcatgttggtttcggtgatgtctatagatcatcctgggaaaaattgttgatttttgactacactcctcgtaagtaa

SEQ ID NO: 1095 - DNA, 306 bp, Artificial Sequence
  Synthetic
atggcagtcaagcatctaatcgttttaaaatttaaggatgaaattacggaggctcaaaaagaagaatttttcaagacatacgtaaatcttgttaacataatcccagccatgaaggacgtgtattggggtaaagatgtcactcagaagaacaaggaagaaggctacactcacattgttgaggtcaccttcgaaagcgttgaaaccatccaagactacattatccaccccgctcatgttggtttcggtgatgtctatagatcattctgggaaaaattgttgatttttgactacactcctggtaagtaa

SEQ ID NO: 1096 - DNA, 306 bp, Artificial Sequence
  Synthetic
atggcagtcaagcatctaatcgttttaaaatttaaggatgaaattacggaggctcaaaaagaagaatttttcaagacatacgtaaatcttgttaacataatcccagccatgaaggacgtgtattggggtaaagatgtcactcagaagaacaaggaagaaggctacactcacattgttgaggtcaccttcgaaagcgttgaaaccatccaagactacattatccaccccgctcatgttggtttcggtgatgtctatagatcaaactgggaaaaattgttgatttttgactacactcctcgtaagtaa

SEQ ID NO: 1097 - DNA, 306 bp, Artificial Sequence
  Synthetic
atggcagtcaagcatctaatcgttttaaaatttaaggatgaaattacggaggctcaaaaagaagaatttttcaagacatacgtaaatcttgttaacataatcccagccatgaaggacgtgtattggggtaaagatgtcactcagaagaacaaggaagaaggctacactcacattgttgaggtcaccttcgaaagcgttgaaaccatccaagactacattatccaccccgctcatgttggtttcggtgatgtctatagatcattctgggaaaaattgttgatttttgactacactcctgctaagtaa

SEQ ID NO: 1098 - DNA, 306 bp, Artificial Sequence
  Synthetic
atggcagtcaagcatctaatcgttttaaaatttaaggatgaaattacggaggctcaaaaagaagaatttttcaagacatacgtaaatcttgttaacataatcccagccatgaaggacgtgtattggggtaaagatgtcactcagaagaacaaggaagaaggctacactcacattgttgaggtcaccttcgaaagcgttgaaaccatccaagactacattatccaccccgctcatgttggtttcggtgatgtctatagatcattctgggaaaaattgttgatttttgactacactcctaataagtaa

SEQ ID NO: 1099 - DNA, 306 bp, Artificial Sequence
  Synthetic
atggcagtcaagcatctaatcgttttaaaatttaaggatgaaattacggaggctcaaaaagaagaatttttcaagacatacgtaaatcttgttaacataatcccagccatgaaggacgtgtattggggtaaagatgtcactcagaagaacaaggaagaaggctacactcacattgttgaggtcaccttcgaaagcgttgaaaccatccaagaatacattatccaccccgctcatgttggtttcggtgatgtcttcagatcattctgggaaaaattgttgatttttgactacactcctcgtaagtaa

SEQ ID NO: 1100 - DNA, 306 bp, Artificial Sequence
  Synthetic
atggcagtcaagcatctaatcgttttaaaatttaaggatgaaattacggaggctcaaaaagaagaatttttcaagacatacgtaaatcttgttaacataatcccagccatgaaggacgtgtattggggtaaagatgtcactcagaagaacaaggaagaaggctacactcacattttcgaggtcaccttcgaaagcgttgaaaccatccaagactacattatccaccccgctcatgttggtttcggtgatgtctatagatcattctgggaaaaattgttgatttttgactacactcctcgtaagtaa

SEQ ID NO: 1101 - DNA, 306 bp, Artificial Sequence
  Synthetic
atggcagtcaagcatctaatcgttttaaaatttaaggatgaaattacggaggctcaaaaagaagaatttttcaagacatacgtaaatcttgttaacataatcccagccatgaaggacgtgtattggggtaaagatgtcactcagaagaacaaggaagaaggctacactcacattgttgaggtcaccttcgaaagcgttgaaaccatccaagactacattatccaccccgctcatgttaatttcggtgatgtctatagatcattctgggaaaaattgttgatttttgactacactcctcgtaagtaa

SEQ ID NO: 1102 - DNA, 306 bp, Artificial Sequence
  Synthetic
atggcagtcaagcatctaatcgttttaaaatttaaggatgaaattacggaggctcaaaaagaagaatttttcaagacatacgtaaatcttgttaacataatcccagccatgaaggacgtgtattggggtaaagatgtcactcagaagaacaaggaagaaggctacactcacattgttgaggtcaccttcgaaagcgttgaaaccatccaagactacattatccaccccgctcatgttggtttcggtgatgtcttcagatcattctgggaaaaattgttgatttttgactacactcctcgtaagtaa

SEQ ID NO: 1103 - DNA, 306 bp, Artificial Sequence
  Synthetic
atggcagtcaagcatctaatcgttttaaaatttaaggatgaaattacggaggctcaaaaagaagaatttttcaagacatacgtaaatcttgttaacataatcccagccatgaaggacgtgtattggggtaaagatgtcactcagaagaacaaggaagaaggctacactcacattgttgaggtcaccttcgaaaatgttgaaaccatccaagactacattatccaccccgctcatgttggtttcggtgatgtctatagatcattctgggaaaaattgttgatttttgactacactcctcgtaagtaa

SEQ ID NO: 1104 - DNA, 306 bp, Artificial Sequence
  Synthetic
atggcagtcaagcatctaatcgttttaaaatttaaggatgaaattacggaggctcaaaaagaagaatttttcaagacatacgtaaatcttgttaacataatcccagccatgaaggacgtgtattggggtaaagatgtcactcagaagaacaaggaagaaggctacactcacattgttgaggtcaccttcgaaagcgttgaaggaatccaagactacattatccaccccgctcatgttggtttcggtgatgtctatagatcattctgggaaaaattgttgatttttgactacactcctcgtaagtaa

SEQ ID NO: 1105 - DNA, 306 bp, Artificial Sequence
  Synthetic
atggcagtcaagcatctaatcgttttaaaatttaaggatgaaattacggaggctcaaaaagaagaatttttcaagacatacgtaaatcttgttaacataatcccagccatgaaggacgtgtattggggtaaagatgtcactcagaagaacaaggaagaaggctacactcacattgttgaggacaccttcgaaagcgttgaaaccatccaagactacattatccaccccgctcatgttggtttcggtgatgtctatagatcattctgggaaaaattgttgatttttgactacactcctcgtaagtaa

SEQ ID NO: 1106 - DNA, 306 bp, Artificial Sequence
  Synthetic
atggcagtcaagcatctaatcgttttaaaatttaaggatgaaattacggaggctcaaaaagaagaatttttcaagacatacgtaaatcttgttaacataatcccagccatgaaggacgtgtattggggtaaagatgtcactcagaagaacaaggaagaaggctacactcacattgttgaggtcaccttcgacagcgttgaaaccatccaagaatacattatccaccccgctcatgttggtttcggtgatgtctatagatcattctgggaaaaattgttgatttttgactacaagcctcgtaagtaa

SEQ ID NO: 1107 - DNA, 306 bp, Artificial Sequence
  Synthetic
atggcagtcaagcatctaatcgttttaaaatttaaggatgaaattacggaggctcaaaaagaagaatttttcaagacatacgtaaatcttgttaacataatcccagccatgaaggacgtgtattggggtaaaattgtcactcagaagaacaaggaagaaggctacactcacattgttgaggtcaccttcgaaagcgttgaaaccatccaagactacattatccaccccgctcatgttggtttcggtgatgtctatagatcattctgggaaaaattgttgatttttgactacactcctcgtaagtaa

SEQ ID NO: 1108 - DNA, 306 bp, Artificial Sequence
  Synthetic
atggcagtcaagcatctaatcgttttaaaatttaaggatgaaattacggaggctcaaaaagaagaatttttcaagacatacgtaaatcttgttaacataatcccagccatgaaggacgtgtattggggtaaagatgtcactcagaagaacaaggaagaaggctacactcacattgttgagtctaccttcgaaagcgttgaaaccatccaagactacattatccaccccgctcatgttggtttcggtgatgtctatagatcattctgggaaaaattgttgatttttgactacactcctcgtaagtaa

SEQ ID NO: 1109 - DNA, 306 bp, Artificial Sequence
  Synthetic
atggcagtcaagcatctaatcgttttaaaatttaaggatgaaattacggaggctcaaaaagaagaatttttcaagacatacgtaaatcttgttaacataatcccagccatgaaggacgtgtattggggtaaagatgtcactcagaagaacaaggaagaaggctacactcacattgttgaggtcaccttcgaaagcgttgaaaccatccaagactacattatccaccccgctcatgttggtttcggtgatgtctatagatcattctgggaaaaattgttgatttttgactacactcctaagaagtaa

SEQ ID NO: 1110-1111 - skipped (2 entries)

SEQ ID NO: 1112 - DNA, 306 bp, Artificial Sequence
  Synthetic
atggcagtcaagcatctaatcgttttaaaatttaaggatgaaattacggaggaccaaaaagaagaatttttcaagcgttacgtaaatcttgttaacaggatcccagccatgaagggagtgtattggggtaaagatgtcactcagaagaacaagcacgaaggcttcactcacattgttgaggtcaccttcgaaaatgttgaaaccatcgctgactacattatccaccccgctcatgttgctttcggtaacaaatatagatcattctgggaaaaattgttgatttttgactacactcctcgtaagtaa

SEQ ID NO: 1113 - DNA, 306 bp, Artificial Sequence
  Synthetic
atggcagtcaagcatctaatcgttttaaaatttaagcgtgaaattacggaggctcaaaaagaagaatttttcaagagatacgtaaatcttgttaacataatcccagccatgaaggacgtgtattggggtaaagatgtcactcagaagaacaaggaagaaggctacactcacattgttgaggtcaccttcgacaatgttgaaaccatccaagactacattatccaccccgctcatgttggtttcggtgaagtctatagatcattctgggaaaaattgttgatttttgactacaagcctcgtaagtaa

SEQ ID NO: 1114 - DNA, 306 bp, Artificial Sequence
  Synthetic
atggcagtcaagcatctaatcgttttaaaatttaaggatgaaattacgaacgaccaaaaagaagaatttttcaagacatacgtaaatcttttgaacaatatcccagccatgaaggacgtgtattggggtaaagatgtcactcagaagaacaaggaagaaggctacactcacattgttgaggtcaccttcgaaagcgttgaaaccatccaatcatacattatccaccccgctcatgttgctttcggtgatttctatagatcattctgggaaaaattgttgatttttgactacactcctcgtaagtaa

SEQ ID NO: 1115 - DNA, 306 bp, Artificial Sequence
  Synthetic
atggcagtcaagcatctaatcgttttaaaatttaagcgtgaaattacggaggatcaaaaagaagaatttttcaagacatacgtaagtcttgttaacataatcccagccatgaaggacgtgtattggggtaaagatgtcactcagaagaacaaggaagaaggctacactcacattgttgaggtcaccttcgaaagcgttgaaaccatcttgcaatacattatccaccccgctcatgttgctttcggtgaagtctatagatcattctgggaaaaattgttgatttttgactacaagcctcgtaagtaa

SEQ ID NO: 1116 - DNA, 306 bp, Artificial Sequence
  Synthetic
atggcagtcaagcatctaatcgttttaaaatttaaggatgaaattacggaggaccaaaaagaagaatttttcaagaggtacgtaaatcttgttaaccgtatcccagccatgaaggacgtgtattggggtaaagatgtcactcagaagaacaagcacgaaggcttcactcacattgttgaggtcaccttcgaaagctacgaaaccatcgctgactacattatccaccccgctcatgttgctttcggtaataagtttagatcattctgggaaaaattgttgatttttgactacactcctcgtaagtaa

SEQ ID NO: 1117 - DNA, 306 bp, Artificial Sequence
  Synthetic
atggcagtcaagcatctaatcgttttaaaatttaagcgtgaaattacggaggatcaaaaagaagaatttttcaagacatacgtatctcttgttaacataatcccagccatgaaggacgtgtattggggtaaagatgtcactcagaagaacaaggaagaaggctacactcacattgttgaggtcaccttcgaaagcgttgaaaccatcttgcaatacattatccaccccgctcatgttgctttcggtaaggtctatagatcattctgggaaaaattgttgatttttgactactaccctcgtaagtaa

SEQ ID NO: 1118 - DNA, 306 bp, Artificial Sequence
  Synthetic
atggcagtcaagcatctaatcgttttaaaatttaaggatgaaattacgaatgctcaaaaagaagaatttttcaagacatacgtaaatcttttgaacaacatcccagccatgaaggacgtgtattggggtaaagatgtcactcagaagaacaaggaagaaggctacactcacattgttgaggtcaccttcgaaaatgttgaaaccatccaaagctacattatccaccccgctcatgttggtttcggtgataagtatagatcattctgggaaaaattgttgatttttgactacactcctcgtaagtaa

SEQ ID NO: 1119 - DNA, 306 bp, Artificial Sequence
  Synthetic
atggcagtcaagcatctaatcgttttaaaatttaaggatgaaattacggaggaccaaaaagaaaagtttttcaagagatacgtaaatcttgttaaccgtatcccagccatgaaggacgtgtattggggtaaagatgtcactcagaagaacaagcacgaaggcttcactcacattgttgaggtcaccttcgaaagctacgaaaccatcgctgactacattatccaccccgctcatgttgctttcggtaacaagtatagatcattctgggaaaaattgttgatttttgactacactcctcgtaagtaa

SEQ ID NO: 1120 - DNA, 306 bp, Artificial Sequence
  Synthetic
atggcagtcaagcatctaatcgttttaaaatttaagcgtgaaattacggaggctcaaaaagaagaatttttcaagaggtacgtaaatcttgttaacataatcccagccatgaagggtgtgtattggggtaaagatgtcactcagaagaacaaggaagaaggctacactcacattgttgaggtcaccttcgacagcgttgaaaccatccaagactacattatccaccccgctcatgttggtttcggtgaagtctatagatcattctgggaaaaattgttgatttttgactacaagcctcgtaagtaa

SEQ ID NO: 1121 - DNA, 306 bp, Artificial Sequence
  Synthetic
atggcagtcaagcatctaatcgttttaaaatttaaggatgaaattacggaggaccaaaaagaagaatttttcaagaggtacgtaaatcttgttaacagaatcccagccatgaaggacgtgtattggggtaaagatgtcactcagaagaacaagcacgaaggcttcactcacattgttgaggtcaccttcgaaagcgttgaaaccatcgctgaatacattatccaccccgctcatgttgctttcggtaataagtatagatcattctgggaaaaattgttgatttttgactacactcctcgtaagtaa

SEQ ID NO: 1122 - DNA, 306 bp, Artificial Sequence
  Synthetic
atggcagtcaagcatctaatcgttttaaaatttaaggatgaaattacgaacgaccaaaaagaagaatttttcaagacatacgtaaatcttctgaacataatcccagccatgaaggacgtgtattggggtaaagatgtcactcagaagaacaaggaagaaggctacactcacattgttgaggtcaccttcgaaagcgttgaaaccatccaatcttacattatccaccccgctcatgttggtttcggtgctaagtatagatcattctgggaaaaattgttgatttttgactacactcctcgtaagtaa

SEQ ID NO: 1123 - DNA, 306 bp, Artificial Sequence
  Synthetic
atggcagtcaagcatctaatcgttttaaaatttaaggatgaaattacggaggaccaaaaagaagaatttttcaagcgttacgtaaatcttgttaacagaatcccagccatgaaggacgtgtattggggtaaagatgtcactcagaagaacaagcacgaaggcttcactcacattgttgaggtcaccttcgaaagctacgaaaccatcgctgaatacattatccaccccgctcatgttgctttcggtaataagtatagatcattctgggaaaaattgttgatttttgactacactcctcgtaagtaa

SEQ ID NO: 1124 - DNA, 306 bp, Artificial Sequence
  Synthetic
atggcagtcaagcatctaatcgttttaaaatttaaggatgaaattacggaggaccaaaaagaagaatttttcaagcgttacgtaaatcttgttaacataatcccagccatgaaggacgtgtattggggtaaagatgtcactcagaagaacaagcacgaaggcttcactcacattgttgaggtcaccttcgaaagcgttgaaaccatcgctgactacattatccaccccgctcatgttgctttcggtaataaatttagatcaaactgggaaaaattgttgatttttgactacactcctcgtaagtaa

SEQ ID NO: 1125 - DNA, 306 bp, Artificial Sequence
  Synthetic
atggcagtcaagcatctaatcgttttaaaatttaaggatgaaattacgaacgaccaaaaagaagaatttttcaagacatacgtaaatcttttgaacaatatcccagccatgaaggacgtgtattggggtaaagatgtcactcagaagaacaaggaagaaggctacactcacattgttgaggtcaccttcgaaagcgttgaaaccatccaagagtacattatccaccccgctcatgttggtttcggtgatttttatagatcattctgggaaaaattgttgatttttgactacactcctcgtaagtaa

SEQ ID NO: 1126 - DNA, 306 bp, Artificial Sequence
  Synthetic
atggcagtcaagcatctaatcgttttaaaatttaagcgtgaaattacggaggctcaaaaagaagaatttttcaagagatacgtaaatcttgttaacataatcccagccatgaaggacgtgtattggggtaaagatgtcactcagaagaacaaggaagaaggctacactcacattgttgaggtcaccttcgacagcgttgaaaccatccaagactacattatccaccccgctcatgttggtttcggtgaaaagtatagatcattctgggaaaaattgttgatttttgactacaagcctcgtaagtaa

SEQ ID NO: 1127 - DNA, 306 bp, Artificial Sequence
  Synthetic
atggcagtcaagcatctaatcgttttaaaatttaaggatgaaattacgaacgaccaaaaagaagaatttttcaagacatacgtaaatcttctgaacataatcccagccatgaaggacgtgtattggggtaaagatgtcactcagaagaacaaggaagaaggctacactcacattgttgaggtcaccttcgaaagcgttgaaaccatccaatcttacattatccaccccgctcatgttggtttcggtgctttctatagatcattctgggaaaaattgttgatttttgactacactcctcgtaagtaa

SEQ ID NO: 1128 - DNA, 306 bp, Artificial Sequence
  Synthetic
atggcagtcaagcatctaatcgttttaaaatttaagcgtgaaattacgaacgctcaaaaagaagaatttttcaagacatacgtaaatcttttgaacataatcccagccatgaaggacgtgtattggggtaaagatgtcactcagaagaacaaggaagaaggctacactcacattgttgaggtcaccttcgaaagcgttgaaaccatccaatcctacattatccaccccgctcatgttggtttcggtgctaagtatagatcattctgggaaaaattgttgatttttgactacactcctcgtaagtaa

SEQ ID NO: 1129 - DNA, 306 bp, Artificial Sequence
  Synthetic
atggcagtcaagcatctaatcgttttaaaatttaagcgtgaaattacggaggaccaaaaagaagaatttttcaagacatacgtatcccttgttaacataatcccagccatgaaggacgtgtattggggtaaagatgtcactcagaagaacaaggaagaaggctacactcacattgttgaggtcaccttcgaaagcgttgaaaccatcctgcaatacattatccaccccgctcatgttgctttcggtgaagtctatagatcattctgggaaaaattgttgatttttgactacactcctcgtaagtaa

SEQ ID NO: 1130 - DNA, 306 bp, Artificial Sequence
  Synthetic
atggcagtcaagcatctaatcgttttaaaatttaagagagaaattacgaacgctcaaaaagaagaatttttcaagacatacgtaaatcttctgaacaatatcccagccatgaaggacgtgtattggggtaaagatgtcactcagaagaacaaggaagaaggctacactcacattgttgaggtcaccttcgaaagcgttgaaaccatccaaagttacattatccaccccgctcatgttggtttcggtgataagtatagatcattctgggaaaaattgttgatttttgactacactcctcgtaagtaa

SEQ ID NO: 1131 - DNA, 306 bp, Artificial Sequence
  Synthetic
atggcagtcaagcatctaatcgttttaaaatttaaggatgaaattacgaacgctcaaaaagaagaatttttcaagaggtacgtaaatcttttgaacataatcccagccatgaaggacgtgtattggggtaaagatgtcactcagaagaacaaggaagaaggctacactcacattgttgaggtcaccttcgaaagcgttgaaaccatccaaagttacattatccaccccgctcatgttggtttcggtaagttctatagatcattctgggaaaaattgttgatttttgactacactcctcgtaagtaa

SEQ ID NO: 1132 - DNA, 306 bp, Artificial Sequence
  Synthetic
atggcagtcaagcatctaatcgttttaaaatttaaggatgaaattacgaatgaccaaaaagaaaagtttttcaagacatacgtaaatcttttgaacaacatcccagccatgaaggacgtgtattggggtaaagatgtcactcagaagaacaaggaagaaggctacactcacattgttgaggtcaccttcgaaagcgttgaaaccatccaagagtacattatccaccccgctcatgttggtttcggtgatttctatagatcattctgggaaaaattgttgatttttgactacactcctcgtaagtaa

SEQ ID NO: 1133 - DNA, 306 bp, Artificial Sequence
  Synthetic
atggcagtcaagcatctaatcgttttaaaatttaaggatgaaattacgaacgaccaaaaagaagaatttttcaagacatacgtaaatcttttgaacataatcccagccatgaagggagtgtattggggtaaagatgtcactcagaagaacaaggaagaaggctacactcacattgttgaggtcaccttcgaaagcgttgaaaccatccaatcgtacattatccaccccgctcatgttggtttcggtgctaagtatagatcattctgggaaaaattgttgatttttgactacactcctcgtaagtaa

SEQ ID NO: 1134 - DNA, 306 bp, Artificial Sequence
  Synthetic
atggcagtcaagcatctaatcgttttaaaatttaagagagaaattacggaggatcaaaaagaagaatttttcaagacatacgtaagtcttgttaacataatcccagccatgaagggagtgtattggggtaaagatgtcactcagaagaacaaggaagaaggctacactcacattgttgaggtcaccttcgaaagcgttgaaaccatcctgcaatacattatccaccccgctcatgttgctttcggtaagaaatatagatcattctgggaaaaattgttgatttttgactacactcctcgtaagtaa

SEQ ID NO: 1135 - DNA, 306 bp, Artificial Sequence
  Synthetic
atggcagtcaagcatctaatcgttttaaaatttaaggatgaaattacgaacgctcaaaaagaaaagtttttcaagacatacgtaaatcttttgaacaatatcccagccatgaaggacgtgtattggggtaaagatgtcactcagaagaacaaggaagaaggctacactcacattgttgaggtcaccttcgaaagcgttgaaaccatccaagaatacattatccaccccgctcatgttggtttcggtgatttctatagatcattctgggaaaaattgttgatttttgactacactcctcgtaagtaa

SEQ ID NO: 1136 - DNA, 306 bp, Artificial Sequence
  Synthetic
atggcagtcaagcatctaatcgttttaaaatttaagcgtgaaattacggaggatcaaaaagaagaatttttcaagacatacgtatctcttgttaacataatcccagccatgaaggacgtgtattggggtaaagatgtcactcagaagaacaaggaagaaggctacactcacattgttgaggtcaccttcgaaaatgttgaaaccatcctgcaatacattatccaccccgctcatgttgctttcggtaaggtctatagatcattctgggaaaaattgttgatttttgactacaagcctcgtaagtaa

SEQ ID NO: 1137 - DNA, 306 bp, Artificial Sequence
  Synthetic
atggcagtcaagcatctaatcgttttaaaatttaagcgtgaaattacggaggaccaaaaagaagaatttttcaagagatacgtaaatcttgttaacataatcccagccatgaagggagtgtattggggtaaagatgtcactcagaagaacaagcacgaaggcttcactcacattgttgaggtcaccttcgaaagcgttgaaaccatcgctgactacattatccaccccgctcatgttgctttcggtaataagtatagatcattctgggaaaaattgttgatttttgactacactcctcgtaagtaa

SEQ ID NO: 1138 - DNA, 306 bp, Artificial Sequence
  Synthetic
atggcagtcaagcatctaatcgttttaaaatttaagcgtgaaattacggaggatcaaaaagaagaatttttcaagacatacgtatcccttgttaacataatcccagccatgaaggacgtgtattggggtaaagatgtcactcagaagaacaaggaagaaggctacactcacattgttgaggtcaccttcgacagcgttgaaaccatcttgcaatacattatccaccccgctcatgttgctttcggtaaggtctatagatcattctgggaaaaattgttgatttttgactacactcctcgtaagtaa

SEQ ID NO: 1139 - DNA, 306 bp, Artificial Sequence
  Synthetic
atggcagtcaagcatctaatcgttttaaaatttaaggatgaaattacggaggctcaaaaagaaaagtttttcaagcgttacgtaaatcttgttaaccacatcccagccatgaaggacgtgtattggggtaaagatgtcactcagaagaacaaggaagaaggcttcactcacattgttgaggtcaccttcgaaagcgttgaaaccatcgctgaatacattatccaccccgctcatgttgccttcggtaaagtctatagatcattctgggaaaaattgttgatttttgactacactcctcgtaagtaa

SEQ ID NO: 1140 - DNA, 306 bp, Artificial Sequence
  Synthetic
atggcagtcaagcatctaatcgttttaaaatttaagcgtgaaattacggaggaccaaaaagaagaatttttcaagacatacgtatcccttgttaacataatcccagccatgaaggacgtgtattggggtaaagatgtcactcagaagaacaaggaagaaggctacactcacattgttgaggtcaccttcgaaagcgttgaaaccatcttgcaatacattggtcaccccgctcatgttgctttcggtaaagtctatagatcattctgggaaaaattgttgatttttgactacaagcctcgtaagtaa

SEQ ID NO: 1141 - DNA, 306 bp, Artificial Sequence
  Synthetic
atggcagtcaagcatctaatcgttttaaaatttaagagagaaattacggaggaccaaaaagaagaatttttcaagacatacgtatctcttgttaacataatcccagccatgaaggacgtgtattggggtaaagatgtcactcagaagaacaaggaagaaggctacactcacattgttgaggtcaccttcgatagcgttgaaaccatcttgcaatacattatccaccccgctcatgttgctttcggtgaagtctatagatcattctgggaaaaattgttgatttttgactacactcctcgtaagtaa

SEQ ID NO: 1142 - DNA, 306 bp, Artificial Sequence
  Synthetic
atggcagtcaagcatctaatcgttttaaaatttaaggatgaaattacgaacgctcaaaaagaagaatttttcaagacatacgtaaatcttttgaacataatcccagccatgaaggacgtgtattggggtaaagatgtcactcagaagaacaaggaagaaggctacactcacattgttgaggtcaccttcgaaagcgttgaaaccatccaatcttacattatccaccccgctcatgttggtttcggtgctaagtatagatcattctgggaaaaattgttgatttttgactacaagcctcgtaagtaa

SEQ ID NO: 1143 - DNA, 306 bp, Artificial Sequence
  Synthetic
atggcagtcaagcatctaatcgttttaaaatttaaggatgaaattacggaggaccaaaaagaagaatttttcaagaggtacgtaaatcttgttaacataatcccagccatgaaggacgtgtattggggtaaagatgtcactcagaagaacaagcacgaaggcttcactcacattgttgaggtcaccttcgaaagcgttgaaaccatcgctgactacattatccaccccgctcatgttgccttcggtaagaaatttagatcattctgggaaaaattgttgatttttgactacactcctcgtaagtaa

SEQ ID NO: 1144 - DNA, 306 bp, Artificial Sequence
  Synthetic
atggcagtcaagcatctaatcgttttaaaatttaaggatgaaattacgaacgctcaaaaagaagaatttttcaagacatacgtaaatcttctgaacaatatcccagccatgaaggacgtgtattggggtaaagatgtcactcagaagaacaaggaagaaggctacactcacattgttgaggtcaccttcgaaagcgttgaaaccatccaagagtacattatccaccccgctcatgttggtttccgtgatttttatagatcattctgggaaaaattgttgatttttgactacactcctcgtaagtaa

SEQ ID NO: 1145 - DNA, 306 bp, Artificial Sequence
  Synthetic
atggcagtcaagcatctaatcgttttaaaatttaaggatgaaattacgaacgaccaaaaagaagaatttttcaagacatacgtaaatcttttgaacataatcccagccatgaaggacgtgtattggggtaaagatgtcactcagaagaacaaggaagaaggctacactcacattgttgaggtcaccttcgaaagcgttgaaaccatccaatcatacattggtcaccccgctcatgttggtttcggtgctaagtatagatcattctgggaaaaattgttgatttttgactacactcctcgtaagtaa

SEQ ID NO: 1146 - DNA, 306 bp, Artificial Sequence
  Synthetic
atggcagtcaagcatctaatcgttttaaaatttaagcgtgaaattacggaggaccaaaaagaagaatttttcaagacatacgtatcacttgttaacataatcccagccatgaaggacgtgtattggggtaaagatgtcactcagaagaacaaggaagaaggctacactcacattgttgaggtcaccttcgaaaatgttgaaaccatcttgcaatacattggacaccccgctcatgttgctttcggtaaggtctatagatcattctgggaaaaattgttgatttttgactacactcctcgtaagtaa

SEQ ID NO: 1147 - DNA, 306 bp, Artificial Sequence
  Synthetic
atggcagtcaagcatctaatcgttttaaaatttaagagagaaattacggaggatcaaaaagaagaatttttcaagacatacgtatctcttgttaacataatcccagccatgaaggacgtgtattggggtaaagatgtcactcagaagaacaaggaagaaggctacactcacattgttgaggtcaccttcgaaagcgttgaaaccatcctggactacattatccaccccgctcatgttgctttcggtgaagtctatagatcattctgggaaaaattgttgatttttgactacaagcctcgtaagtaa

SEQ ID NO: 1148 - DNA, 306 bp, Artificial Sequence
  Synthetic
atggcagtcaagcatctaatcgttttaaaatttaagagagaaattacgaacgaccaaaaagaagaatttttcaagacatacgtaaatcttttgaacataatcccagccatgaaggacgtgtattggggtaaagatgtcactcagaagaacaaggaagaaggctacactcacattgttgaggtcaccttcgaaagcgttgaaaccatccaatcctacattatccaccccgctcatgttggtttcggtgagttctatagatcattctgggaaaaattgttgatttttgactacactcctcgtaagtaa

SEQ ID NO: 1149 - DNA, 306 bp, Artificial Sequence
  Synthetic
atggcagtcaagcatctaatcgttttaaaatttaagagggaaattacggaggatcaaaaagaaaagtttttcaagacatacgtaagccttgttaacataatcccagccatgaaggacgtgtattggggtaaagatgtcactcagaagaacaaggaagaaggctacactcacattgttgaggtcaccttcgaaagcgttgaaaccatcctgcaatacattatccaccccgctcatgttgctttcggtaaggtctatagatcattctgggaaaaattgttgatttttgactacactcctcgtaagtaa

SEQ ID NO: 1150 - DNA, 306 bp, Artificial Sequence; identical to SEQ ID NO: 1006
  Synthetic

SEQ ID NO: 1151 - DNA, 306 bp, Artificial Sequence
  Synthetic
atggcagtcaagcatctaatcgttttaaaatttaagcgtgaaattacggaggaccaaaaagaagaatttttcaagagatacgtatcgcttgttaacataatcccagccatgaaggacgtgtattggggtaaagatgtcactcagaagaacaaggaagaaggctacactcacattgttgaggtcaccttcgaaagcgttgaaaccatcttgcaatacattatccaccccgctcatgttgctttcggtaaggtctatagatcattctgggaaaaattgttgatttttgactacaagcctcgtaagtaa

SEQ ID NO: 1152 - DNA, 306 bp, Artificial Sequence
  Synthetic
atggcagtcaagcatctaatcgttttaaaatttaaggatgaaattacgaacgaccaaaaagaagaatttttcaagacatacgtaaatcttttgaacaatatcccagccatgaaggacgtgtattggggtaaagatgtcactcagaagaacaaggaagaaggctacactcacattgttgaggtcaccttcgaaagcgttgaaaccatccaatcatacattatccaccccgctcatgttggtttcggtgataagtatagatcattctgggaaaaattgttgatttttgactactaccctcgtaagtaa

SEQ ID NO: 1153 - DNA, 306 bp, Artificial Sequence
  Synthetic
atggcagtcaagcatctaatcgttttaaaatttaagagggaaattacggaggatcaaaaagaagaatttttcaagacatacgtaagtcttgttaacataatcccagccatgaaggacgtgtattggggtaaagatgtcactcagaagaacaaggaagaaggctacactcacattgttgaggtcaccttcgaaaatgttgaaaccatcctggactacattggtcaccccgctcatgttgctttcggtaaagtctatagatcattctgggaaaaattgttgatttttgactacactcctcgtaagtaa

SEQ ID NO: 1154 - DNA, 306 bp, Artificial Sequence
  Synthetic
atggcagtcaagcatctaatcgttttaaaatttaaggatgaaattacggaggctcaaaaagaagaatttttcaagagatacgtaaatcttgttaaccacatcccagccatgaaggacgtgtattggggtaaagatgtcactcagaagaacaaggaagaaggcttcactcacattgttgaggtcaccttcgaaagcgttgaaaccatcgctgactacattggacaccccgctcatgttgctttcggtaaggtcgccagatcattctgggaaaaattgttgatttttgactacactcctcgtaagtaa

SEQ ID NO: 1155 - DNA, 306 bp, Artificial Sequence
  Synthetic
atggcagtcaagcatctaatcgttttaaaatttaaggatgaaattacggaggctcaaaaagaagaatttttcaagagatacgtaaatcttgttaaccacatcccagccatgaaggacgtgtattggggtaaagatgtcactcagaagaacaaggaagaaggcttcactcacattgttgaggtcaccttcgaaagcgttgaaaccatcgctgactacattatccaccccgctcatgttgctttcggtaaagtcgccagatcattctgggaaaaattgttgatttttgactacactcctcgtaagtaa

SEQ ID NO: 1156 - DNA, 306 bp, Artificial Sequence
  Synthetic
atggcagtcaagcatctaatcgttttaaaatttaaggatgaaattacgaatgctcaaaaagaagaatttttcaagacatacgtaaatcttttgaacaacatcccagccatgaagggcgtgtattggggtaaagatgtcactcagaagaacaaggaagaaggctacactcacattgttgaggtcaccttcgaaagcgttgaaaccatccaatcttacattatccaccccgctcatgttggtttcggtgataagtatagatcattctgggaaaaattgttgatttttgactacactcctcgtaagtaa

SEQ ID NO: 1157 - DNA, 306 bp, Artificial Sequence
  Synthetic
atggcagtcaagcatctaatcgttttaaaatttaaggatgaaattacgaacgaccaaaaagaagaatttttcaagacatacgtaaatcttttgaacataatcccagccatgaaggacgtgtattggggtaaagatgtcactcagaagaacaaggaagaaggctacactcacattgttgaggtcaccttcgaaagcgttgaaaccatccaatcatacattggtcaccccgctcatgttggtttcggtgagttctatagatcattctgggaaaaattgttgatttttgactacactcctcgtaagtaa

SEQ ID NO: 1158 - DNA, 306 bp, Artificial Sequence
  Synthetic
atggcagtcaagcatctaatcgttttaaaatttaagagagaaattacggaggctcaaaaagaagaatttttcaagaggtacgtaaatcttgttaacataatcccagccatgaagggagtgtattggggtaaagatgtcactcagaagaacaaggaagaaggctacactcacattgttgaggtcaccttcgaaaacgttgaaaccatccaagactacattatccaccccgctcatgttggtttcggtgaaaaatatagatcattctgggaaaaattgttgatttttgactacactcctcgtaagtaa

SEQ ID NO: 1159 - DNA, 306 bp, Artificial Sequence
  Synthetic
atggcagtcaagcatctaatcgttttaaaatttaaggatgaaattacggaggaccaaaaagaagaatttttcaagcgttacgtaaatcttgttaacataatcccagccatgaagggtgtgtattggggtaaagatgtcactcagaagaacaagcacgaaggcttcactcacattgttgaggtcaccttcgacagcgttgaaaccatcgctgactacattatccaccccgctcatgttgctttcggtaacaagtatagatcattctgggaaaaattgttgatttttgactacactcctcgtaagtaa

SEQ ID NO: 1160 - DNA, 306 bp, Artificial Sequence
  Synthetic
atggcagtcaagcatctaatcgttttaaaatttaagcgtgaaattacggaggatcaaaaagaagaatttttcaagagatacgtatcccttgttaacataatcccagccatgaaggacgtgtattggggtaaagatgtcactcagaagaacaaggaagaaggctacactcacattgttgaggtcaccttcgacagcgttgaaaccatcttgcaatacattatccaccccgctcatgttgctttcggtaaggtctatagatcattctgggaaaaattgttgatttttgactacactcctcgtaagtaa

SEQ ID NO: 1161 - DNA, 306 bp, Artificial Sequence
  Synthetic
atggcagtcaagcatctaatcgttttaaaatttaaggatgaaattacggaggctcaaaaagaagaatttttcaagcgttacgtaaatcttgttaaccacatcccagccatgaaggacgtgtattggggtaaagatgtcactcagaagaacaaggaagaaggcttcactcacattgttgaggtcaccttcgaaagcgttgaaaccatcgctgactacattatccaccccgctcatgttgccttcggtgaagtctatagatcattctgggaaaaattgttgatttttgactacaagcctcgtaagtaa

SEQ ID NO: 1162 - DNA, 306 bp, Artificial Sequence
  Synthetic
atggcagtcaagcatctaatcgttttaaaatttaaggatgaaattacggaggaccaaaaagaagaatttttcaagcgttacgtaaatcttgttaacagaatcccagccatgaaggacgtgtattggggtaaagatgtcactcagaagaacaagcacgaaggcttcactcacattgttgaggtcaccttcgaaaatgttgaaaccatcgctgactacattatccaccccgctcatgttgctttcggtgaaaaatatagatcattctgggaaaaattgttgatttttgactacactcctcgtaagtaa

SEQ ID NO: 1163 - DNA, 306 bp, Artificial Sequence; identical to SEQ ID NO: 487
  Synthetic

SEQ ID NO: 1164 - DNA, 306 bp, Artificial Sequence
  Synthetic
atggcagtcaagcatctaatcgttttaaaatttaaggatgaaattacggaggaccaaaaagaagaatttttcaagaggtacgtaaatcttgttaacataatcccagccatgaaggacgtgtattggggtaaagatgtcactcagaagaacaagcacgaaggcttcactcacattgttgaggtcaccttcgaaagcgttgaaaccatcgctgactacattatccaccccgctcatgttgctttcggtaataagtatagatcaaactgggaaaaattgttgatttttgactacaagcctcgtaagtaa

SEQ ID NO: 1165 - DNA, 306 bp, Artificial Sequence
  Synthetic
atggcagtcaagcatctaatcgttttaaaatttaaggatgaaattacgaatgaccaaaaagaaaagtttttcaagacatacgtaaatcttttgaacataatcccagccatgaaggacgtgtattggggtaaagatgtcactcagaagaacaaggaagaaggctacactcacattgttgaggtcaccttcgaaagcgttgaaaccatccaagagtacattatccaccccgctcatgttggtttcggtgctttctatagatcattctgggaaaaattgttgatttttgactacactcctcgtaagtaa

SEQ ID NO: 1166 - DNA, 306 bp, Artificial Sequence
  Synthetic
atggcagtcaagcatctaatcgttttaaaatttaaggatgaaattacgaatgaccaaaaagaagaatttttcaagacatacgtaaatcttttgaacataatcccagccatgaaggacgtgtattggggtaaagatgtcactcagaagaacaaggaagaaggctacactcacattgttgaggtcaccttcgaaagcgttgaaaccatccaatcttacattatccaccccgctcatgttggtttcggtgagttttatagatcattctgggaaaaattgttgatttttgactacaagcctcgtaagtaa

SEQ ID NO: 1167 - DNA, 306 bp, Artificial Sequence
  Synthetic
atggcagtcaagcatctaatcgttttaaaatttaagagggaaattacggaggaccaaaaagaagaatttttcaagagatacgtaagtcttgttaacataatcccagccatgaaggacgtgtattggggtaaagatgtcactcagaagaacaaggaagaaggctacactcacattgttgaggtcaccttcgaaagcgttgaaaccatcttgcaatacattatccaccccgctcatgttgctttcggtgaggtctatagatcattctgggaaaaattgttgatttttgactacactcctcgtaagtaa

SEQ ID NO: 1168 - DNA, 306 bp, Artificial Sequence
  Synthetic
atggcagtcaagcatctaatcgttttaaaatttaaggatgaaattacggaggctcaaaaagaagaatttttcaagagatacgtaaatcttgttaaccacatcccagccatgaaggacgtgtattggggtaaagatgtcactcagaagaacaaggaagaaggcttcactcacattgttgaggtcaccttcgaaagcgttgaaaccatcgctgactacattatccaccccgctcatgttgccttcggtgaagtctatagatcaaattgggaaaaattgttgatttttgactacactcctcgtaagtaa

SEQ ID NO: 1169 - DNA, 306 bp, Artificial Sequence
  Synthetic
atggcagtcaagcatctaatcgttttaaaatttaagagagaaattacggaggaccaaaaagaagaatttttcaagacatacgtatcgcttgttaacataatcccagccatgaaggacgtgtattggggtaaagatgtcactcagaagaacaaggaagaaggctacactcacattgttgaggtcaccttcgaaagcgttgaaaccatcttgcaatacattatccaccccgctcatgttgctttcggtgaagtctatagatcattctgggaaaaattgttgatttttgactactatcctcgtaagtaa

SEQ ID NO: 1170 - DNA, 306 bp, Artificial Sequence
  Synthetic
atggcagtcaagcatctaatcgttttaaaatttaagcgtgaaattacggaggaccaaaaagaagaatttttcaagacatacgtatcacttgttaacataatcccagccatgaaggacgtgtattggggtaaagatgtcactcagaagaacaaggaagaaggctacactcacattgttgaggtcaccttcgaaagcgttgaaaccatcttgcaatacattatccaccccgctcatgttgctttcggtaagaagttcagatcattctgggaaaaattgttgatttttgactacactcctcgtaagtaa

SEQ ID NO: 1171 - DNA, 306 bp, Artificial Sequence
  Synthetic
atggcagtcaagcatctaatcgttttaaaatttaagcgtgaaattacggaggaccaaaaagaagaatttttcaagagatacgtatcgcttgttaacataatcccagccatgaaggacgtgtattggggtaaagatgtcactcagaagaacaaggaagaaggctacactcacattgttgaggtcaccttcgaaagcgttgaaaccatcttgcaatacattatccaccccgctcatgttgctttcggtaaggtctatagatcattctgggaaaaattgttgatttttgactacactcctcgtaagtaa

SEQ ID NO: 1172 - DNA, 306 bp, Artificial Sequence
  Synthetic
atggcagtcaagcatctaatcgttttaaaatttaaggatgaaattacggaggaccaaaaagaagaatttttcaagcgttacgtaaatcttgttaacataatcccagccatgaagggtgtgtattggggtaaagatgtcactcagaagaacaagcacgaaggcttcactcacattgttgaggtcaccttcgaaagcgttgaaaccatcgctgactacattatccaccccgctcatgttgctttcggtaataagtatagatcattctgggaaaaattgttgatttttgactacaagcctcgtaagtaa

SEQ ID NO: 1173 - DNA, 306 bp, Artificial Sequence
  Synthetic
atggcagtcaagcatctaatcgttttaaaatttaaggatgaaattacgaatgctcaaaaagaagaatttttcaagacatacgtaaatcttttgaacataatcccagccatgaaggacgtgtattggggtaaagatgtcactcagaagaacaaggaagaaggctacactcacattgttgaggtcaccttcgaaagcgttgaaaccatccaatcctacattatccaccccgctcatgttggtttcggtaagttttatagatcattctgggaaaaattgttgatttttgactactaccctcgtaagtaa

SEQ ID NO: 1174 - DNA, 306 bp, Artificial Sequence
  Synthetic
atggcagtcaagcatctaatcgttttaaaatttaaggatgaaattacgaacgaccaaaaagaagaatttttcaagacatacgtaaatcttttgaacataatcccagccatgaaggacgtgtattggggtaaagatgtcactcagaagaacaaggaagaaggctacactcacattgttgaggtcaccttcgacagcgttgaaaccatccaatcttacattggacaccccgctcatgttggtttcggtgctttctatagatcattctgggaaaaattgttgatttttgactacactcctcgtaagtaa

SEQ ID NO: 1175 - DNA, 306 bp, Artificial Sequence
  Synthetic
atggcagtcaagcatctaatcgttttaaaatttaaggatgaaattacggaggctcaaaaagaagaatttttcaagcgttacgtaaatcttgttaacataatcccagccatgaagggcgtgtattggggtaaagatgtcactcagaagaacaaggaagaaggctacactcacattgttgaggtcaccttcgaaaacgttgaaaccatccaagactacattatccaccccgctcatgttggtttcggtgaaaaatatagatcattctgggaaaaattgttgatttttgactacaagcctcgtaagtaa

SEQ ID NO: 1176 - DNA, 306 bp, Artificial Sequence
  Synthetic
atggcagtcaagcatctaatcgttttaaaatttaaggatgaaattacgaacgctcaaaaagaagaatttttcaagacatacgtaaatcttttgaacaatatcccagccatgaaggacgtgtattggggtaaagatgtcactcagaagaacaaggaagaaggctacactcacattgttgaggtcaccttcgaaagcgttgaaaccatccaatcatacattatccaccccgctcatgttggtttcggtgataaatatagatcattctgggaaaaattgttgatttttgactacaagcctcgtaagtaa

SEQ ID NO: 1177 - DNA, 306 bp, Artificial Sequence
  Synthetic
atggcagtcaagcatctaatcgttttaaaatttaaggatgaaattacgaatgctcaaaaagaagaatttttcaagacatacgtaaatcttttgaacataatcccagccatgaaggacgtgtattggggtaaagatgtcactcagaagaacaaggaagaaggctacactcacattgttgaggtcaccttcgaaagcgttgaaaccatccaaagttacattatccaccccgctcatgttggtttcggtgagttctatagatcattctgggaaaaattgttgatttttgactactatcctcgtaagtaa

SEQ ID NO: 1178 - DNA, 306 bp, Artificial Sequence
  Synthetic
atggcagtcaagcatctaatcgttttaaaatttaagagagaaattacggaggatcaaaaagaagaatttttcaagcgttacgtaaatcttgttaacataatcccagccatgaaggacgtgtattggggtaaagatgtcactcagaagaacaagcacgaaggcttcactcacattgttgaggtcaccttcgaaagcgttgaaaccatcgctgactacattatccaccccgctcatgttgctttcggtaataagtatagatcattctgggaaaaattgttgatttttgactacactcctcgtaagtaa

SEQ ID NO: 1179 - DNA, 306 bp, Artificial Sequence
  Synthetic
atggcagtcaagcatctaatcgttttaaaatttaaggatgaaattacggaggaccaaaaagaagaatttttcaagagatacgtaaatcttgttaacaacatcccagccatgaaggacgtgtattggggtaaagatgtcactcagaagaacaagcacgaaggcttcactcacattgttgaggtcaccttcgaaagcgttgaaaccatcgcttcctacattatccaccccgctcatgttgctttcggtaataagtatagatcattctgggaaaaattgttgatttttgactacactcctcgtaagtaa

SEQ ID NO: 1180 - DNA, 306 bp, Artificial Sequence
  Synthetic
atggcagtcaagcatctaatcgttttaaaatttaagagagaaattacggaggatcaaaaagaagaatttttcaagacatacgtatcacttgttaacataatcccagccatgaaggacgtgtattggggtaaagatgtcactcagaagaacaaggaagaaggctacactcacattgttgaggtcaccttcgacaatgttgaaaccatcttgcaatacattatccaccccgctcatgttgccttcggtaaggtctatagatcattctgggaaaaattgttgatttttgactacactcctcgtaagtaa

SEQ ID NO: 1181 - DNA, 306 bp, Artificial Sequence
  Synthetic
atggcagtcaagcatctaatcgttttaaaatttaaggatgaaattacgaacgaccaaaaagaagaatttttcaagacatacgtaaatcttctgaacataatcccagccatgaaggacgtgtattggggtaaagatgtcactcagaagaacaaggaagaaggctacactcacattgttgaggtcaccttcgaaagctacgaaaccatccaatcttacattatccaccccgctcatgttggtttcggtgcttttttcagatcattctgggaaaaattgttgatttttgactacactcctcgtaagtaa

SEQ ID NO: 1182 - DNA, 306 bp, Artificial Sequence
  Synthetic
atggcagtcaagcatctaatcgttttaaaatttaagagagaaattacgaatgatcaaaaagaagaatttttcaagacatacgtaaatcttttgaacataatcccagccatgaaggacgtgtattggggtaaagatgtcactcagaagaacaaggaagaaggctacactcacattgttgaggtcaccttcgaaagcgttgaaaccatccaatcctacattatccaccccgctcatgttggtttcggtaagttctatagatcattctgggaaaaattgttgatttttgactacactcctcgtaagtaa

SEQ ID NO: 1183 - DNA, 306 bp, Artificial Sequence
  Synthetic
atggcagtcaagcatctaatcgttttaaaatttaaggatgaaattacggaggaccaaaaagaagaatttttcaagaggtacgtaaatcttgttaacataatcccagccatgaaggacgtgtattggggtaaagatgtcactcagaagaacaagcacgaaggcttcactcacattgttgaggtcaccttcgatagcgttgaaaccatcgctgactacattggtcaccccgctcatgttgctttcggtaataaatatagatcattctgggaaaaattgttgatttttgactacactcctcgtaagtaa

SEQ ID NO: 1184 - DNA, 306 bp, Artificial Sequence
  Synthetic
atggcagtcaagcatctaatcgttttaaaatttaaggatgaaattacgaatgctcaaaaagaagaatttttcaagacatacgtaaatcttttgaacataatcccagccatgaaggacgtgtattggggtaaagatgtcactcagaagaacaaggaagaaggctacactcacattgttgaggtcaccttcgaaagcgttgaaaccatccaatcctacattatccaccccgctcatgttggtttcggtaagttttatagatcattctgggaaaaattgttgatttttgactacaagcctcgtaagtaa

SEQ ID NO: 1185 - DNA, 306 bp, Artificial Sequence
  Synthetic
atggcagtcaagcatctaatcgttttaaaatttaaggatgaaattacggaggctcaaaaagaagaatttttcaagaggtacgtaaatcttgttaacataatcccagccatgaagggtgtgtattggggtaaagatgtcactcagaagaacaaggaagaaggctacactcacattgttgaggtcaccttcgacaatgttgaaaccatccaagactacattatccaccccgctcatgttggtttcggtgaagtctatagatcattctgggaaaaattgttgatttttgactacaagcctcgtaagtaa

SEQ ID NO: 1186 - DNA, 306 bp, Artificial Sequence
  Synthetic
atggcagtcaagcatctaatcgttttaaaatttaagcgtgaaattacggaggaccaaaaagaaaagtttttcaagacatacgtatcacttgttaacataatcccagccatgaaggacgtgtattggggtaaagatgtcactcagaagaacaaggaagaaggctacactcacattgttgaggtcaccttcgaaagcgttgaaaccatcttggaatacattatccaccccgctcatgttgctttcggtaaagtctatagatcattctgggaaaaattgttgatttttgactacactcctcgtaagtaa

SEQ ID NO: 1187 - DNA, 306 bp, Artificial Sequence; identical to SEQ ID NO: 542
  Synthetic

SEQ ID NO: 1188 - DNA, 306 bp, Artificial Sequence
  Synthetic
atggcagtcaagcatctaatcgttttaaaatttaaggatgaaattacggaggctcaaaaagaagaatttttcaagcgttacgtaaatcttgttaaccacatcccagccatgaaggacgtgtattggggtaaagatgtcactcagaagaacaaggaagaaggcttcactcacattgttgaggtcaccttcgaaagcgttgaaaccatcgctgactacattatccaccccgctcatgttgctttcggtgaaaaagccagatcattctgggaaaaattgttgatttttgactacactcctcgtaagtaa

SEQ ID NO: 1189 - DNA, 306 bp, Artificial Sequence
  Synthetic
atggcagtcaagcatctaatcgttttaaaatttaaggatgaaattacgaatgctcaaaaagaagaatttttcaagagatacgtaaatcttttgaacataatcccagccatgaaggacgtgtattggggtaaagatgtcactcagaagaacaaggaagaaggctacactcacattgttgaggtcaccttcgaaagcgttgaaaccatccaatcatacattatccaccccgctcatgttggtttcggtgagttctatagatcattctgggaaaaattgttgatttttgactacactcctcgtaagtaa

SEQ ID NO: 1190 - DNA, 306 bp, Artificial Sequence
  Synthetic
atggcagtcaagcatctaatcgttttaaaatttaaggatgaaattacggaggctcaaaaagaagaatttttcaagaggtacgtaaatcttgttaaccacatcccagccatgaaggacgtgtattggggtaaagatgtcactcagaagaacaaggaagaaggcttcactcacattgttgaggtcaccttcgaaagcgttgaaaccatcgctgactacattatccaccccgctcatgttgccttcggtaaaaagtatagatcaaactgggaaaaattgttgatttttgactacactcctcgtaagtaa

SEQ ID NO: 1191 - DNA, 306 bp, Artificial Sequence
  Synthetic
atggcagtcaagcatctaatcgttttaaaatttaagagggaaattacggaggctcaaaaagaagaatttttcaagacatacgtaaatcttgttaacataatcccagccatgaagggtgtgtattggggtaaagatgtcactcagaagaacaaggaagaaggctacactcacattgttgaggtcaccttcgacaacgttgaaaccatccaagactacattatccaccccgctcatgttggtttcggtgataaatatagatcattctgggaaaaattgttgatttttgactacaagcctcgtaagtaa

SEQ ID NO: 1192 - DNA, 306 bp, Artificial Sequence
  Synthetic
atggcagtcaagcatctaatcgttttaaaatttaagagggaaattacggaggctcaaaaagaagaatttttcaagagatacgtaaatcttgttaacataatcccagccatgaagggcgtgtattggggtaaagatgtcactcagaagaacaaggaagaaggctacactcacattgttgaggtcaccttcgaaaatgttgaaaccatccaagactacattatccaccccgctcatgttggtttcggtgaagtctatagatcattctgggaaaaattgttgatttttgactacaagcctcgtaagtaa

SEQ ID NO: 1193 - DNA, 306 bp, Artificial Sequence
  Synthetic
atggcagtcaagcatctaatcgttttaaaatttaagcgtgaaattacggaggaccaaaaagaagaatttttcaagacatacgtaagccttgttaacataatcccagccatgaaggacgtgtattggggtaaagatgtcactcagaagaacaaggaagaaggctacactcacattgttgaggtcaccttcgaaaatgttgaaaccatcttgcaatacattatccaccccgctcatgttgctttcggtaagaagtatagatcattctgggaaaaattgttgatttttgactacactcctcgtaagtaa

SEQ ID NO: 1194 - DNA, 306 bp, Artificial Sequence
  Synthetic
atggcagtcaagcatctaatcgttttaaaatttaagagagaaattacggaggctcaaaaagaagaatttttcaagaggtacgtaaatcttgttaacataatcccagccatgaagggagtgtattggggtaaagatgtcactcagaagaacaaggaagaaggctacactcacattgttgaggtcaccttcgacaacgttgaaaccatccaagactacattatccaccccgctcatgttggtttcggtgataaatatagatcattctgggaaaaattgttgatttttgactacactcctcgtaagtaa

SEQ ID NO: 1195 - DNA, 306 bp, Artificial Sequence
  Synthetic
atggcagtcaagcatctaatcgttttaaaatttaagagagaaattacggaggctcaaaaagaagaatttttcaagcgttacgtaaatcttgttaacataatcccagccatgaagggcgtgtattggggtaaagatgtcactcagaagaacaaggaagaaggctacactcacattgttgaggtcaccttcgaaaatgttgaaaccatccaagactacattatccaccccgctcatgttggtttcggtgataagtatagatcattctgggaaaaattgttgatttttgactacaagcctcgtaagtaa

SEQ ID NO: 1196 - DNA, 306 bp, Artificial Sequence
  Synthetic
atggcagtcaagcatctaatcgttttaaaatttaaggatgaaattacgaatgctcaaaaagaagaatttttcaagacatacgtaaatcttttgaacataatcccagccatgaaggacgtgtattggggtaaagatgtcactcagaagaacaaggaagaaggctacactcacattgttgaggtcaccttcgaaagcgttgaaaccatccaatcctacattatccaccccgctcatgttggtttcggtgctttttatagatcattctgggaaaaattgttgatttttgactactatcctcgtaagtaa

SEQ ID NO: 1197 - DNA, 306 bp, Artificial Sequence
  Synthetic
atggcagtcaagcatctaatcgttttaaaatttaagagggaaattacggaggaccaaaaagaagaatttttcaagacatacgtatcacttgttaacataatcccagccatgaaggacgtgtattggggtaaagatgtcactcagaagaacaaggaagaaggctacactcacattgttgaggtcaccttcgaaagcgttgaaaccatcctgcaatacattatccaccccgctcatgttgctttcggtaaagtctatagatcattctgggaaaaattgttgatttttgactacactcctcgtaagtaa

SEQ ID NO: 1198 - DNA, 306 bp, Artificial Sequence
  Synthetic
atggcagtcaagcatctaatcgttttaaaatttaagagagaaattacggaggatcaaaaagaagaatttttcaagcgttacgtaaatcttgttaacataatcccagccatgaaggacgtgtattggggtaaagatgtcactcagaagaacaagcacgaaggcttcactcacattgttgaggtcaccttcgaaaatgttgaaaccatcgctgactacattatccaccccgctcatgttgctttcggtaacaagtatagatcattctgggaaaaattgttgatttttgactacactcctcgtaagtaa

SEQ ID NO: 1199 - DNA, 306 bp, Artificial Sequence
  Synthetic
atggcagtcaagcatctaatcgttttaaaatttaaggatgaaattacggaggctcaaaaagaagaatttttcaagaggtacgtaaatcttgttaacaacatcccagccatgaaggacgtgtattggggtaaagatgtcactcagaagaacaaggaagaaggcttcactcacattgttgaggtcaccttcgaaagcgttgaaaccatcgcttcctacattatccaccccgctcatgttgccttcggtaaggtctatagatcattctgggaaaaattgttgatttttgactacactcctcgtaagtaa

SEQ ID NO: 1200 - DNA, 306 bp, Artificial Sequence
  Synthetic
atggcagtcaagcatctaatcgttttaaaatttaaggatgaaattacggaggaccaaaaagaaaagtttttcaagaggtacgtaaatcttgttaacataatcccagccatgaaggacgtgtattggggtaaagatgtcactcagaagaacaagcacgaaggcttcactcacattgttgaggtcaccttcgaaagcgttgaaaccatcgctgaatacattatccaccccgctcatgttgctttcggtaacaaatatagatcattctgggaaaaattgttgatttttgactacactcctcgtaagtaa

SEQ ID NO: 1201 - DNA, 306 bp, Artificial Sequence
  Synthetic
atggcagtcaagcatctaatcgttttaaaatttaaggatgaaattacgaatgaccaaaaagaagaatttttcaagacatacgtaaatcttttgaacataatcccagccatgaaggacgtgtattggggtaaagatgtcactcagaagaacaaggaagaaggctacactcacattgttgaggtcaccttcgaaagcgttgaaaccatccaatcgtacattatccaccccgctcatgttggtttcggtaagttctatagatcattctgggaaaaattgttgatttttgactactaccctcgtaagtaa

SEQ ID NO: 1202 - DNA, 306 bp, Artificial Sequence
  Synthetic
atggcagtcaagcatctaatcgttttaaaatttaaggatgaaattacgaatgctcaaaaagaagaatttttcaagacatacgtaaatcttttgaacaacatcccagccatgaaggacgtgtattggggtaaagatgtcactcagaagaacaaggaagaaggctacactcacattgttgaggtcaccttcgaaagctatgaaaccatccaatcttacattatccaccccgctcatgttggtttcggtgatttttatagatcattctgggaaaaattgttgatttttgactacactcctcgtaagtaa

SEQ ID NO: 1203 - DNA, 306 bp, Artificial Sequence
  Synthetic
atggcagtcaagcatctaatcgttttaaaatttaagagagaaattacggaggctcaaaaagaagaatttttcaagacatacgtaaatcttgttaacataatcccagccatgaagggtgtgtattggggtaaagatgtcactcagaagaacaaggaagaaggctacactcacattgttgaggtcaccttcgacaatgttgaaaccatccaagactacattatccaccccgctcatgttggtttcggtgaagtctatagatcattctgggaaaaattgttgatttttgactacaagcctcgtaagtaa

SEQ ID NO: 1204 - DNA, 306 bp, Artificial Sequence
  Synthetic
atggcagtcaagcatctaatcgttttaaaatttaagcgtgaaattacggaggaccaaaaagaagaatttttcaagaggtacgtaaatcttgttaacagaatcccagccatgaaggacgtgtattggggtaaagatgtcactcagaagaacaagcacgaaggcttcactcacattgttgaggtcaccttcgaaagcgttgaaaccatcgctgactacattatccaccccgctcatgttgctttcggtaataagtttagatcattctgggaaaaattgttgatttttgactacactcctcgtaagtaa

SEQ ID NO: 1205 - DNA, 306 bp, Artificial Sequence
  Synthetic
atggcagtcaagcatctaatcgttttaaaatttaaggatgaaattacgaatgctcaaaaagaagaatttttcaagacatacgtaaatcttttgaacaacatcccagccatgaaggacgtgtattggggtaaagatgtcactcagaagaacaaggaagaaggctacactcacattgttgaggtcaccttcgacagcgttgaaaccatccaatcatacattatccaccccgctcatgttggtttcggtgataagtatagatcattctgggaaaaattgttgatttttgactacactcctcgtaagtaa

SEQ ID NO: 1206 - DNA, 306 bp, Artificial Sequence
  Synthetic
atggcagtcaagcatctaatcgttttaaaatttaaggatgaaattacggaggctcaaaaagaagaatttttcaagaggtacgtaaatcttgttaaccacatcccagccatgaaggacgtgtattggggtaaagatgtcactcagaagaacaaggaagaaggcttcactcacattgttgaggtcaccttcgacagcgttgaaaccatcgctgactacattatccaccccgctcatgttgccttcggtgaagtcgctagatcattctgggaaaaattgttgatttttgactacactcctcgtaagtaa

SEQ ID NO: 1207 - DNA, 306 bp, Artificial Sequence
  Synthetic
atggcagtcaagcatctaatcgttttaaaatttaaggatgaaattacgaacgaccaaaaagaagaatttttcaagacatacgtaaatcttctgaacaacatcccagccatgaaggacgtgtattggggtaaagatgtcactcagaagaacaaggaagaaggctacactcacattgttgaggtcaccttcgaaagcgttgaaaccatccaatcttacattatccaccccgctcatgttggtttcggtaagaaatatagatcattctgggaaaaattgttgatttttgactacactcctcgtaagtaa

SEQ ID NO: 1208 - DNA, 306 bp, Artificial Sequence
  Synthetic
atggcagtcaagcatctaatcgttttaaaatttaagagggaaattacggaggctcaaaaagaagaatttttcaagcgttacgtaaatcttgttaacataatcccagccatgaagggcgtgtattggggtaaagatgtcactcagaagaacaaggaagaaggctacactcacattgttgaggtcaccttcgacagcgttgaaaccatccaagactacattatccaccccgctcatgttggtttcggtgataaatatagatcattctgggaaaaattgttgatttttgactacaagcctcgtaagtaa

SEQ ID NO: 1209 - DNA, 306 bp, Artificial Sequence
  Synthetic
atggcagtcaagcatctaatcgttttaaaatttaaggatgaaattacgaatgctcaaaaagaagaatttttcaagacatacgtaaatcttttgaacataatcccagccatgaaggacgtgtattggggtaaagatgtcactcagaagaacaaggaagaaggctacactcacattgttgaggtcaccttcgaaagcgttgaaaccatccaatcttacattggtcaccccgctcatgttggtttcggtaagttctatagatcattctgggaaaaattgttgatttttgactacactcctcgtaagtaa

SEQ ID NO: 1210 - DNA, 306 bp, Artificial Sequence
  Synthetic
atggcagtcaagcatctaatcgttttaaaatttaaggatgaaattacgaatgaccaaaaagaagaatttttcaagacatacgtaaatcttctgaacataatcccagccatgaaggacgtgtattggggtaaagatgtcactcagaagaacaaggaagaaggctacactcacattgttgaggtcaccttcgaaagcgttgaaaccatccaatcatacattatccaccccgctcatgttggtttcggtgagttctatagatcattctgggaaaaattgttgatttttgactactatcctcgtaagtaa

SEQ ID NO: 1211 - DNA, 306 bp, Artificial Sequence
  Synthetic
atggcagtcaagcatctaatcgttttaaaatttaagagggaaattacggaggaccaaaaagaagaatttttcaagacatacgtatcacttgttaacataatcccagccatgaaggacgtgtattggggtaaagatgtcactcagaagaacaaggaagaaggctacactcacattgttgaggtcaccttcgaaagcgttgaaaccatcctggaatacattatccaccccgctcatgttgctttcggtaaggtctatagatcattctgggaaaaattgttgatttttgactacactcctcgtaagtaa

SEQ ID NO: 1212 - DNA, 306 bp, Artificial Sequence
  Synthetic
atggcagtcaagcatctaatcgttttaaaatttaaggatgaaattacgaatgctcaaaaagaagaatttttcaagacatacgtaaatcttttgaacaacatcccagccatgaaggacgtgtattggggtaaagatgtcactcagaagaacaaggaagaaggctacactcacattgttgaggtcaccttcgaaagcgttgaaaccatccaatcctacattatccaccccgctcatgttggtttcggtaagaaatatagatcattctgggaaaaattgttgatttttgactacactcctcgtaagtaa

SEQ ID NO: 1213 - DNA, 306 bp, Artificial Sequence
  Synthetic
atggcagtcaagcatctaatcgttttaaaatttaaggatgaaattacgaatgaccaaaaagaagaatttttcaagacatacgtaaatcttctgaacataatcccagccatgaaggacgtgtattggggtaaagatgtcactcagaagaacaaggaagaaggctacactcacattgttgaggtcaccttcgaaagcgttgaaaccatccaagaatacattatccaccccgctcatgttggtttcggtgctttctatagatcattctgggaaaaattgttgatttttgactacactcctcgtaagtaa

SEQ ID NO: 1214 - DNA, 306 bp, Artificial Sequence
  Synthetic
atggcagtcaagcatctaatcgttttaaaatttaagcgtgaaattacggaggaccaaaaagaagaatttttcaagagatacgtaaatcttgttaacataatcccagccatgaaggacgtgtattggggtaaagatgtcactcagaagaacaagcacgaaggcttcactcacattgttgaggtcaccttcgaaagcgttgaaaccatcgctgactacattatccaccccgctcatgttgctttcggtaacaagtatagatcattctgggaaaaattgttgatttttgactactaccctcgtaagtaa

SEQ ID NO: 1215 - DNA, 306 bp, Artificial Sequence
  Synthetic
atggcagtcaagcatctaatcgttttaaaatttaaggatgaaattacgaacgaccaaaaagaagaatttttcaagacatacgtaaatcttctgaacataatcccagccatgaaggacgtgtattggggtaaagatgtcactcagaagaacaaggaagaaggctacactcacattgttgaggtcaccttcgaaaatgttgaaaccatccaatcttacattatccaccccgctcatgttggtttcggtgctaaatatagatcattctgggaaaaattgttgatttttgactacactcctcgtaagtaa

SEQ ID NO: 1216 - DNA, 306 bp, Artificial Sequence
  Synthetic
atggcagtcaagcatctaatcgttttaaaatttaaggatgaaattacggaggaccaaaaagaagaatttttcaagagatacgtaaatcttgttaacataatcccagccatgaagggtgtgtattggggtaaagatgtcactcagaagaacaagcacgaaggcttcactcacattgttgaggtcaccttcgaaagcgttgaaaccatcgctgactacattggtcaccccgctcatgttgctttcggtaataaatatagatcattctgggaaaaattgttgatttttgactacactcctcgtaagtaa

SEQ ID NO: 1217 - DNA, 306 bp, Artificial Sequence
  Synthetic
atggcagtcaagcatctaatcgttttaaaatttaaggatgaaattacgaatgctcaaaaagaagaatttttcaagacatacgtaaatcttttgaacataatcccagccatgaagggcgtgtattggggtaaagatgtcactcagaagaacaaggaagaaggctacactcacattgttgaggtcaccttcgaaagcgttgaaaccatccaaagttacattatccaccccgctcatgttggtttcggtgctaaatatagatcattctgggaaaaattgttgatttttgactacactcctcgtaagtaa

SEQ ID NO: 1218 - DNA, 306 bp, Artificial Sequence
  Synthetic
atggcagtcaagcatctaatcgttttaaaatttaagagagaaattacggaggatcaaaaagaagaatttttcaagaggtacgtaaatcttgttaacataatcccagccatgaaggacgtgtattggggtaaagatgtcactcagaagaacaagcacgaaggcttcactcacattgttgaggtcaccttcgaaagcgttgaaaccatcgctgactacattatccaccccgctcatgttgctttcggtaataagtttagatcattctgggaaaaattgttgatttttgactacactcctcgtaagtaa

SEQ ID NO: 1219 - DNA, 306 bp, Artificial Sequence
  Synthetic
atggcagtcaagcatctaatcgttttaaaatttaaggatgaaattacggaggctcaaaaagaagaatttttcaagagatacgtaaatcttgttaaccacatcccagccatgaaggacgtgtattggggtaaagatgtcactcagaagaacaaggaagaaggcttcactcacattgttgaggtcaccttcgacagcgttgaaaccatcgctgactacattatccaccccgctcatgttgccttcggtaaaaagtatagatcattctgggaaaaattgttgatttttgactacactcctcgtaagtaa

SEQ ID NO: 1220 - DNA, 306 bp, Artificial Sequence
  Synthetic
atggcagtcaagcatctaatcgttttaaaatttaaggatgaaattacgaacgctcaaaaagaagaatttttcaagacatacgtaaatcttctgaacaatatcccagccatgaaggacgtgtattggggtaaagatgtcactcagaagaacaaggaagaaggctacactcacattgttgaggtcaccttcgaaagcgttgaaaccatccaatcctacattatccaccccgctcatgttggtttcggtgataagtatagatcattctgggaaaaattgttgatttttgactactatcctcgtaagtaa

SEQ ID NO: 1221 - DNA, 306 bp, Artificial Sequence
  Synthetic
atggcagtcaagcatctaatcgttttaaaatttaagcgtgaaattacggaggaccaaaaagaagaatttttcaagacatacgtaagccttgttaacataatcccagccatgaaggacgtgtattggggtaaagatgtcactcagaagaacaaggaagaaggctacactcacattgttgaggtcaccttcgatagcgttgaaaccatcttgcaatacattatccaccccgctcatgttgctttcggtaagaaatatagatcattctgggaaaaattgttgatttttgactacactcctcgtaagtaa

SEQ ID NO: 1222 - DNA, 306 bp, Artificial Sequence
  Synthetic
atggcagtcaagcatctaatcgttttaaaatttaaggatgaaattacgaacgctcaaaaagaagaatttttcaagacatacgtaaatcttttgaacataatcccagccatgaaggacgtgtattggggtaaagatgtcactcagaagaacaaggaagaaggctacactcacattgttgaggtcaccttcgaaaatgttgaaaccatccaatcatacattatccaccccgctcatgttggtttcggtgctaaatatagatcattctgggaaaaattgttgatttttgactacactcctcgtaagtaa

SEQ ID NO: 1223 - DNA, 306 bp, Artificial Sequence
  Synthetic
atggcagtcaagcatctaatcgttttaaaatttaaggatgaaattacgaatgctcaaaaagaagaatttttcaagagatacgtaaatcttttgaacaacatcccagccatgaaggacgtgtattggggtaaagatgtcactcagaagaacaaggaagaaggctacactcacattgttgaggtcaccttcgacagcgttgaaaccatccaatcgtacattatccaccccgctcatgttggtttcggtgatttttatagatcattctgggaaaaattgttgatttttgactacactcctcgtaagtaa

SEQ ID NO: 1224 - DNA, 306 bp, Artificial Sequence
  Synthetic
atggcagtcaagcatctaatcgttttaaaatttaaggatgaaattacgaatgaccaaaaagaagaatttttcaagacatacgtaaatcttttgaacaacatcccagccatgaaggacgtgtattggggtaaagatgtcactcagaagaacaaggaagaaggctacactcacattgttgaggtcaccttcgaaagcgttgaaaccatccaatcatacattatccaccccgctcatgttggtttcggtgaaaagtatagatcattctgggaaaaattgttgatttttgactacactcctcgtaagtaa

SEQ ID NO: 1225 - DNA, 306 bp, Artificial Sequence
  Synthetic
atggcagtcaagcatctaatcgttttaaaatttaagagagaaattacgaatgatcaaaaagaagaatttttcaagacatacgtaaatcttttgaacataatcccagccatgaaggacgtgtattggggtaaagatgtcactcagaagaacaaggaagaaggctacactcacattgttgaggtcaccttcgaaagcgttgaaaccatccaatcgtacattatccaccccgctcatgttggtttcggtgctaagtatagatcattctgggaaaaattgttgatttttgactacactcctcgtaagtaa

SEQ ID NO: 1226 - DNA, 306 bp, Artificial Sequence
  Synthetic
atggcagtcaagcatctaatcgttttaaaatttaaggatgaaattacggaggaccaaaaagaagaatttttcaagcgttacgtaaatcttgttaacataatcccagccatgaaggacgtgtattggggtaaagatgtcactcagaagaacaagcacgaaggcttcactcacattgttgaggtcaccttcgaaaacgttgaaaccatcgctgactacattatccaccccgctcatgttgctttcggtaataaatatagatcattctgggaaaaattgttgatttttgactactaccctcgtaagtaa

SEQ ID NO: 1227 - DNA, 306 bp, Artificial Sequence
  Synthetic
atggcagtcaagcatctaatcgttttaaaatttaaggatgaaattacggaggaccaaaaagaaaagtttttcaagcgttacgtaaatcttgttaacataatcccagccatgaaggacgtgtattggggtaaagatgtcactcagaagaacaagcacgaaggcttcactcacattgttgaggtcaccttcgaaagcgttgaaaccatcgctgactacattatccaccccgctcatgttgctttcggtaacaagtatagatcattctgggaaaaattgttgatttttgactacactcctcgtaagtaa

SEQ ID NO: 1228 - DNA, 306 bp, Artificial Sequence
  Synthetic
atggcagtcaagcatctaatcgttttaaaatttaaggatgaaattacggaggaccaaaaagaagaatttttcaagagatacgtaaatcttgttaacataatcccagccatgaaggacgtgtattggggtaaagatgtcactcagaagaacaagcacgaaggcttcactcacattgttgaggtcaccttcgatagcgttgaaaccatcgctgactacattatccaccccgctcatgttgctttcggtaataagtatagatcattctgggaaaaattgttgatttttgactacaagcctcgtaagtaa

SEQ ID NO: 1229 - DNA, 306 bp, Artificial Sequence
  Synthetic
atggcagtcaagcatctaatcgttttaaaatttaaggatgaaattacggaggaccaaaaagaagaatttttcaagcgttacgtaaatcttgttaacagaatcccagccatgaagggagtgtattggggtaaagatgtcactcagaagaacaagcacgaaggcttcactcacattgttgaggtcaccttcgacagcgttgaaaccatcgctgactacattatccaccccgctcatgttgctttcggtaacaagtatagatcattctgggaaaaattgttgatttttgactacactcctcgtaagtaa

SEQ ID NO: 1230 - DNA, 306 bp, Artificial Sequence
  Synthetic
atggcagtcaagcatctaatcgttttaaaatttaaggatgaaattacggaggaccaaaaagaagaatttttcaagaggtacgtaaatcttgttaacataatcccagccatgaaggacgtgtattggggtaaagatgtcactcagaagaacaagcacgaaggcttcactcacattgttgaggtcaccttcgaaagcgttgaaaccatcgctgactacattatccaccccgctcatgttgccttcggtaataagtttagatcattctgggaaaaattgttgatttttgactacactcctcgtaagtaa

SEQ ID NO: 1231 - DNA, 306 bp, Artificial Sequence
  Synthetic
atggcagtcaagcatctaatcgttttaaaatttaaggatgaaattacggaggaccaaaaagaagaatttttcaagcgttacgtaaatcttgttaacataatcccagccatgaaggacgtgtattggggtaaagatgtcactcagaagaacaagcacgaaggcttcactcacattgttgaggtcaccttcgaaagcgttgaaaccatcgctgactacattatccaccccgctcatgttgctttcggtgaaaagtatagatcattctgggaaaaattgttgatttttgactactaccctcgtaagtaa

SEQ ID NO: 1232 - DNA, 306 bp, Artificial Sequence
  Synthetic
atggcagtcaagcatctaatcgttttaaaatttaaggatgaaattacgaatgaccaaaaagaagaatttttcaagcgttacgtaaatcttctgaacaacatcccagccatgaaggacgtgtattggggtaaagatgtcactcagaagaacaaggaagaaggctacactcacattgttgaggtcaccttcgaaagcgttgaaaccatccaatcttacattatccaccccgctcatgttggtttcggtgataaatatagatcattctgggaaaaattgttgatttttgactacactcctcgtaagtaa

SEQ ID NO: 1233 - DNA, 306 bp, Artificial Sequence
  Synthetic
atggcagtcaagcatctaatcgttttaaaatttaaggatgaaattacggaggaccaaaaagaagaatttttcaagagatacgtaaatcttgttaaccgtatcccagccatgaaggacgtgtattggggtaaagatgtcactcagaagaacaagcacgaaggcttcactcacattgttgaggtcaccttcgaaagcgttgaaaccatcgctgactacattatccaccccgctcatgttgctttcggtaataagtatagatcattctgggaaaaattgttgatttttgactacactcctcgtaagtaa

SEQ ID NO: 1234 - DNA, 306 bp, Artificial Sequence
  Synthetic
atggcagtcaagcatctaatcgttttaaaatttaaggatgaaattacggaggctcaaaaagaagaatttttcaagagatacgtaaatcttgttaaccacatcccagccatgaaggacgtgtattggggtaaagatgtcactcagaagaacaaggaagaaggcttcactcacattgttgaggtcaccttcgacagcgttgaaaccatcgctgactacattatccaccccgctcatgttgccttcggtaaggtcgctagatcattctgggaaaaattgttgatttttgactacactcctcgtaagtaa

SEQ ID NO: 1235 - DNA, 306 bp, Artificial Sequence
  Synthetic
atggcagtcaagcatctaatcgttttaaaatttaagcgtgaaattacggaggaccaaaaagaagaatttttcaagacatacgtatcacttgttaacataatcccagccatgaaggacgtgtattggggtaaagatgtcactcagaagaacaaggaagaaggctacactcacattgttgaggtcaccttcgaaagctatgaaaccatcttggactacattatccaccccgctcatgttgctttcggtaaagtctttagatcattctgggaaaaattgttgatttttgactacactcctcgtaagtaa

SEQ ID NO: 1236 - DNA, 306 bp, Artificial Sequence
  Synthetic
atggcagtcaagcatctaatcgttttaaaatttaagcgtgaaattacggaggctcaaaaagaagaatttttcaagacatacgtaaatcttgttaacataatcccagccatgaagggtgtgtattggggtaaagatgtcactcagaagaacaaggaagaaggctacactcacattgttgaggtcaccttcgacagcgttgaaaccatccaagactacattatccaccccgctcatgttggtttcggtgaaaaatatagatcattctgggaaaaattgttgatttttgactacaagcctcgtaagtaa

SEQ ID NO: 1237 - DNA, 306 bp, Artificial Sequence
  Synthetic
atggcagtcaagcatctaatcgttttaaaatttaaggatgaaattacggaggaccaaaaagaagaatttttcaagcgttacgtaaatcttgttaacataatcccagccatgaaggacgtgtattggggtaaagatgtcactcagaagaacaagcacgaaggcttcactcacattgttgaggtcaccttcgaaagcgttgaaaccatcgctgactacattatccaccccgctcatgttgctttcggtaacaagtatagatcattctgggaaaaattgttgatttttgactacactcctcgtaagtaa

SEQ ID NO: 1238 - DNA, 306 bp, Artificial Sequence
  Synthetic
atggcagtcaagcatctaatcgttttaaaatttaaggatgaaattacgaatgctcaaaaagaagaatttttcaagacatacgtaaatcttttgaacaacatcccagccatgaaggacgtgtattggggtaaagatgtcactcagaagaacaaggaagaaggctacactcacattgttgaggtcaccttcgaaagcgttgaaaccatccaaagttacattatccaccccgctcatgttggtttccgtgatttttatagatcattctgggaaaaattgttgatttttgactacactcctcgtaagtaa

SEQ ID NO: 1239 - DNA, 306 bp, Artificial Sequence
  Synthetic
atggcagtcaagcatctaatcgttttaaaatttaagagagaaattacggaggatcaaaaagaagaatttttcaagacatacgtatcccttgttaacataatcccagccatgaaggacgtgtattggggtaaagatgtcactcagaagaacaaggaagaaggctacactcacattgttgaggtcaccttcgaaagcgttgaaaccatcttggactacattggacaccccgctcatgttgctttcggtaaagtcttcagatcattctgggaaaaattgttgatttttgactacactcctcgtaagtaa

SEQ ID NO: 1240 - DNA, 306 bp, Artificial Sequence; identical to SEQ ID NO: 477
  Synthetic

SEQ ID NO: 1241 - DNA, 306 bp, Artificial Sequence
  Synthetic
atggcagtcaagcatctaatcgttttaaaatttaaggatgaaattacggaggaccaaaaagaagaatttttcaagaggtacgtaaatcttgttaaccgtatcccagccatgaaggacgtgtattggggtaaagatgtcactcagaagaacaagcacgaaggcttcactcacattgttgaggtcaccttcgaaaatgttgaaaccatcgctgactacattatccaccccgctcatgttgctttcggtaacaagtatagatcattctgggaaaaattgttgatttttgactactaccctcgtaagtaa

SEQ ID NO: 1242 - DNA, 306 bp, Artificial Sequence
  Synthetic
atggcagtcaagcatctaatcgttttaaaatttaaggatgaaattacgaacgaccaaaaagaagaatttttcaagacatacgtaaatcttctgaacaatatcccagccatgaaggacgtgtattggggtaaagatgtcactcagaagaacaaggaagaaggctacactcacattgttgaggtcaccttcgaaagcgttgaaaccatccaatcctacattatccaccccgctcatgttggtttcggtgataaatatagatcattctgggaaaaattgttgatttttgactacaagcctcgtaagtaa

SEQ ID NO: 1243 - DNA, 306 bp, Artificial Sequence
  Synthetic
atggcagtcaagcatctaatcgttttaaaatttaagagagaaattacggaggaccaaaaagaagaatttttcaagacatacgtatcacttgttaacataatcccagccatgaaggacgtgtattggggtaaagatgtcactcagaagaacaaggaagaaggctacactcacattgttgaggtcaccttcgaaagcgttgaaaccatcttggactacattatccaccccgctcatgttgctttcggtaaggtctatagatcattctgggaaaaattgttgatttttgactacactcctcgtaagtaa

SEQ ID NO: 1244 - DNA, 306 bp, Artificial Sequence
  Synthetic
atggcagtcaagcatctaatcgttttaaaatttaagagagaaattacggaggaccaaaaagaagaatttttcaagacatacgtaagtcttgttaacataatcccagccatgaaggacgtgtattggggtaaagatgtcactcagaagaacaaggaagaaggctacactcacattgttgaggtcaccttcgaaagcgttgaaaccatcttgcaatacattatccaccccgctcatgttgctttcggtaagaaatatagatcattctgggaaaaattgttgatttttgactactatcctcgtaagtaa

SEQ ID NO: 1245 - DNA, 306 bp, Artificial Sequence
  Synthetic
atggcagtcaagcatctaatcgttttaaaatttaagagggaaattacggaggaccaaaaagaaaagtttttcaagacatacgtatcacttgttaacataatcccagccatgaaggacgtgtattggggtaaagatgtcactcagaagaacaaggaagaaggctacactcacattgttgaggtcaccttcgaaagctatgaaaccatcttggactacattatccaccccgctcatgttgctttcggtaaggtctatagatcattctgggaaaaattgttgatttttgactacactcctcgtaagtaa

SEQ ID NO: 1246 - DNA, 306 bp, Artificial Sequence
  Synthetic
atggcagtcaagcatctaatcgttttaaaatttaaggatgaaattacgaacgaccaaaaagaagaatttttcaagacatacgtaaatcttttgaacataatcccagccatgaaggacgtgtattggggtaaagatgtcactcagaagaacaaggaagaaggctacactcacattgttgaggtcaccttcgaaagcgttgaaaccatccaatcctacattatccaccccgctcatgttggtttcggtaagttctatagatcattctgggaaaaattgttgatttttgactacactcctcgtaagtaa

SEQ ID NO: 1247 - DNA, 306 bp, Artificial Sequence
  Synthetic
atggcagtcaagcatctaatcgttttaaaatttaaggatgaaattacgaacgctcaaaaagaagaatttttcaagacatacgtaaatcttttgaacataatcccagccatgaaggacgtgtattggggtaaagatgtcactcagaagaacaaggaagaaggctacactcacattgttgaggtcaccttcgaaagcgttgaaaccatccaatcgtacattatccaccccgctcatgttggtttcggtgagttttatagatcattctgggaaaaattgttgatttttgactacaagcctcgtaagtaa

SEQ ID NO: 1248 - DNA, 306 bp, Artificial Sequence
  Synthetic
atggcagtcaagcatctaatcgttttaaaatttaaggatgaaattacgaacgaccaaaaagaagaatttttcaagacatacgtaaatcttttgaacaacatcccagccatgaaggacgtgtattggggtaaagatgtcactcagaagaacaaggaagaaggctacactcacattgttgaggtcaccttcgaaagcgttgaaaccatccaatcttacattggacaccccgctcatgttggtttcggtgataagtatagatcattctgggaaaaattgttgatttttgactacactcctcgtaagtaa

SEQ ID NO: 1249 - DNA, 306 bp, Artificial Sequence
  Synthetic
atggcagtcaagcatctaatcgttttaaaatttaagcgtgaaattacggaggctcaaaaagaagaatttttcaagagatacgtaaatcttgttaacataatcccagccatgaaggacgtgtattggggtaaagatgtcactcagaagaacaaggaagaaggctacactcacattgttgaggtcaccttcgacaatgttgaaaccatccaagactacattatccaccccgctcatgttggtttcggtgataaatatagatcattctgggaaaaattgttgatttttgactacaagcctcgtaagtaa

SEQ ID NO: 1250 - DNA, 306 bp, Artificial Sequence
  Synthetic
atggcagtcaagcatctaatcgttttaaaatttaaggatgaaattacggaggaccaaaaagaagaatttttcaagagatacgtaaatcttgttaacataatcccagccatgaaggacgtgtattggggtaaagatgtcactcagaagaacaagcacgaaggcttcactcacattgttgaggtcaccttcgaaagcgttgaaaccatcgctgaatacattatccaccccgctcatgttgctttcggtaataagtatagatcattctgggaaaaattgttgatttttgactacactcctcgtaagtaa

SEQ ID NO: 1251 - DNA, 306 bp, Artificial Sequence
  Synthetic
atggcagtcaagcatctaatcgttttaaaatttaaggatgaaattacgaacgaccaaaaagaagaatttttcaagacatacgtaaatcttctgaacataatcccagccatgaaggacgtgtattggggtaaagatgtcactcagaagaacaaggaagaaggctacactcacattgttgaggtcaccttcgaaagctatgaaaccatccaagagtacattatccaccccgctcatgttggtttcggtgctttctatagatcattctgggaaaaattgttgatttttgactacactcctcgtaagtaa

SEQ ID NO: 1252 - DNA, 306 bp, Artificial Sequence
  Synthetic
atggcagtcaagcatctaatcgttttaaaatttaagcgtgaaattacggaggctcaaaaagaagaatttttcaagacatacgtaaatcttgttaacataatcccagccatgaagggagtgtattggggtaaagatgtcactcagaagaacaaggaagaaggctacactcacattgttgaggtcaccttcgaaaatgttgaaaccatccaagactacattatccaccccgctcatgttggtttcggtgaaaaatatagatcattctgggaaaaattgttgatttttgactacaagcctcgtaagtaa

SEQ ID NO: 1253 - DNA, 306 bp, Artificial Sequence
  Synthetic
atggcagtcaagcatctaatcgttttaaaatttaagcgtgaaattacggaggctcaaaaagaaaagtttttcaagacatacgtaaatcttgttaacataatcccagccatgaaggacgtgtattggggtaaagatgtcactcagaagaacaaggaagaaggctacactcacattgttgaggtcaccttcgaaagctatgaaaccatccaagaatacattatccaccccgctcatgttggtttcggtaaagtctatagatcattctgggaaaaattgttgatttttgactacaagcctcgtaagtaa

SEQ ID NO: 1254 - DNA, 306 bp, Artificial Sequence
  Synthetic
atggcagtcaagcatctaatcgttttaaaatttaaggatgaaattacgaatgctcaaaaagaagaatttttcaagacatacgtaaatcttttgaacaacatcccagccatgaaggacgtgtattggggtaaagatgtcactcagaagaacaaggaagaaggctacactcacattgttgaggtcaccttcgacagcgttgaaaccatccaatcgtacattatccaccccgctcatgttggtttcggtgatttttatagatcattctgggaaaaattgttgatttttgactactaccctcgtaagtaa

SEQ ID NO: 1255 - DNA, 306 bp, Artificial Sequence
  Synthetic
atggcagtcaagcatctaatcgttttaaaatttaaggatgaaattacgaatgaccaaaaagaagaatttttcaagacatacgtaaatcttctgaacaacatcccagccatgaaggacgtgtattggggtaaagatgtcactcagaagaacaaggaagaaggctacactcacattgttgaggtcaccttcgacagcgttgaaaccatccaatcttacattatccaccccgctcatgttggtttcggtgataagtatagatcattctgggaaaaattgttgatttttgactacactcctcgtaagtaa

SEQ ID NO: 1256 - DNA, 306 bp, Artificial Sequence
  Synthetic
atggcagtcaagcatctaatcgttttaaaatttaaggatgaaattacgaatgaccaaaaagaagaatttttcaagacatacgtaaatcttctgaacaacatcccagccatgaagggtgtgtattggggtaaagatgtcactcagaagaacaaggaagaaggctacactcacattgttgaggtcaccttcgaaagcgttgaaaccatccaaagttacattatccaccccgctcatgttggtttcggtgataagtatagatcattctgggaaaaattgttgatttttgactacactcctcgtaagtaa

SEQ ID NO: 1257 - DNA, 306 bp, Artificial Sequence
  Synthetic
atggcagtcaagcatctaatcgttttaaaatttaaggatgaaattacgaatgaccaaaaagaagaatttttcaagacatacgtaaatcttctgaacaacatcccagccatgaaggacgtgtattggggtaaagatgtcactcagaagaacaaggaagaaggctacactcacattgttgaggtcaccttcgaaagcgttgaaaccatccaatcgtacattatccaccccgctcatgttggtttcggtgatttttatagatcattctgggaaaaattgttgatttttgactacactcctcgtaagtaa

SEQ ID NO: 1258 - DNA, 306 bp, Artificial Sequence
  Synthetic
atggcagtcaagcatctaatcgttttaaaatttaagagagaaattacggaggctcaaaaagaagaatttttcaagacatacgtaaatcttgttaacataatcccagccatgaaggacgtgtattggggtaaagatgtcactcagaagaacaaggaagaaggctacactcacattgttgaggtcaccttcgataatgttgaaaccatccaagactacattatccaccccgctcatgttggtttcggtgaaaagtatagatcattctgggaaaaattgttgatttttgactacaagcctcgtaagtaa

SEQ ID NO: 1259 - DNA, 306 bp, Artificial Sequence; identical to SEQ ID NO: 537
  Synthetic

SEQ ID NO: 1260 - DNA, 306 bp, Artificial Sequence
  Synthetic
atggcagtcaagcatctaatcgttttaaaatttaaggatgaaattacgaacgctcaaaaagaagaatttttcaagacatacgtaaatcttttgaacataatcccagccatgaaggacgtgtattggggtaaagatgtcactcagaagaacaaggaagaaggctacactcacattgttgaggtcaccttcgaaagctacgaaaccatccaatcgtacattatccaccccgctcatgttggtttcggtgctttctttagatcattctgggaaaaattgttgatttttgactacactcctcgtaagtaa

SEQ ID NO: 1261 - DNA, 306 bp, Artificial Sequence
  Synthetic
atggcagtcaagcatctaatcgttttaaaatttaaggatgaaattacggaggctcaaaaagaagaatttttcaagaggtacgtaaatcttgttaaccacatcccagccatgaaggacgtgtattggggtaaagatgtcactcagaagaacaaggaagaaggcttcactcacattgttgaggtcaccttcgaaagcgttgaaaccatcgctgactacattatccaccccgctcatgttgccttcggtaaggtctatagatcattctgggaaaaattgttgatttttgactacactcctcgtaagtaa

SEQ ID NO: 1262 - DNA, 306 bp, Artificial Sequence
  Synthetic
atggcagtcaagcatctaatcgttttaaaatttaaggatgaaattacgaatgaccaaaaagaagaatttttcaagacatacgtaaatcttttgaacataatcccagccatgaaggacgtgtattggggtaaagatgtcactcagaagaacaaggaagaaggctacactcacattgttgaggtcaccttcgacagcgttgaaaccatccaatcctacattatccaccccgctcatgttggtttcggtgctttctatagatcattctgggaaaaattgttgatttttgactacaagcctcgtaagtaa

SEQ ID NO: 1263 - DNA, 306 bp, Artificial Sequence
  Synthetic
atggcagtcaagcatctaatcgttttaaaatttaagagagaaattacggaggaccaaaaagaagaatttttcaagacatacgtatcccttgttaacataatcccagccatgaaggacgtgtattggggtaaagatgtcactcagaagaacaaggaagaaggctacactcacattgttgaggtcaccttcgaaagcgttgaaaccatcctggactacattatccaccccgctcatgttgctttcggtaagaagtatagatcattctgggaaaaattgttgatttttgactacaagcctcgtaagtaa

SEQ ID NO: 1264 - DNA, 306 bp, Artificial Sequence
  Synthetic
atggcagtcaagcatctaatcgttttaaaatttaaggatgaaattacgaatgaccaaaaagaagaatttttcaagacatacgtaaatcttctgaacataatcccagccatgaaggacgtgtattggggtaaagatgtcactcagaagaacaaggaagaaggctacactcacattgttgaggtcaccttcgaaagcgttgaaaccatccaatcatacattatccaccccgctcatgttggtttcggtgctaaatttagatcattctgggaaaaattgttgatttttgactacactcctcgtaagtaa

SEQ ID NO: 1265 - DNA, 306 bp, Artificial Sequence
  Synthetic
atggcagtcaagcatctaatcgttttaaaatttaaggatgaaattacggaggaccaaaaagaagaatttttcaagaggtacgtaaatcttgttaacagaatcccagccatgaagggtgtgtattggggtaaagatgtcactcagaagaacaagcacgaaggcttcactcacattgttgaggtcaccttcgaaagcgttgaaaccatcgctgactacattatccaccccgctcatgttgctttcggtaagaagtatagatcattctgggaaaaattgttgatttttgactacactcctcgtaagtaa

SEQ ID NO: 1266 - DNA, 306 bp, Artificial Sequence
  Synthetic
atggcagtcaagcatctaatcgttttaaaatttaagagagaaattacggaggctcaaaaagaagaatttttcaagcgttacgtaaatcttgttaacataatcccagccatgaagggcgtgtattggggtaaagatgtcactcagaagaacaaggaagaaggctacactcacattgttgaggtcaccttcgacagcgttgaaaccatccaagactacattatccaccccgctcatgttggtttcggtgaaaaatatagatcattctgggaaaaattgttgatttttgactacactcctcgtaagtaa

SEQ ID NO: 1267 - DNA, 306 bp, Artificial Sequence
  Synthetic
atggcagtcaagcatctaatcgttttaaaatttaaggatgaaattacggaggctcaaaaagaagaatttttcaagagatacgtaaatcttgttaaccacatcccagccatgaaggacgtgtattggggtaaagatgtcactcagaagaacaaggaagaaggcttcactcacattgttgaggtcaccttcgacagcgttgaaaccatcgctgactacattatccaccccgctcatgttgccttcggtaaggtctatagatcattctgggaaaaattgttgatttttgactacaagcctcgtaagtaa

SEQ ID NO: 1268 - DNA, 306 bp, Artificial Sequence
  Synthetic
atggcagtcaagcatctaatcgttttaaaatttaagcgtgaaattacggaggctcaaaaagaagaatttttcaagacatacgtaaatcttgttaacataatcccagccatgaagggtgtgtattggggtaaagatgtcactcagaagaacaaggaagaaggctacactcacattgttgaggtcaccttcgacaatgttgaaaccatccaagactacattatccaccccgctcatgttggtttcggtgaaaagtatagatcattctgggaaaaattgttgatttttgactacactcctcgtaagtaa

SEQ ID NO: 1269 - DNA, 306 bp, Artificial Sequence
  Synthetic
atggcagtcaagcatctaatcgttttaaaatttaaggatgaaattacgaacgaccaaaaagaagaatttttcaagcgttacgtaaatcttttgaacataatcccagccatgaaggacgtgtattggggtaaagatgtcactcagaagaacaaggaagaaggctacactcacattgttgaggtcaccttcgaaagcgttgaaaccatccaatcgtacattatccaccccgctcatgttggtttcggtaaattttatagatcattctgggaaaaattgttgatttttgactacactcctcgtaagtaa

SEQ ID NO: 1270 - DNA, 306 bp, Artificial Sequence
  Synthetic
atggcagtcaagcatctaatcgttttaaaatttaaggatgaaattacgaatgaccaaaaagaagaatttttcaagagatacgtaaatcttttgaacataatcccagccatgaaggacgtgtattggggtaaagatgtcactcagaagaacaaggaagaaggctacactcacattgttgaggtcaccttcgaaagcgttgaaaccatccaatcttacattatccaccccgctcatgttggtttcggtgagttctatagatcattctgggaaaaattgttgatttttgactacactcctcgtaagtaa

SEQ ID NO: 1271 - DNA, 306 bp, Artificial Sequence
  Synthetic
atggcagtcaagcatctaatcgttttaaaatttaaggatgaaattacgaacgaccaaaaagaagaatttttcaagacatacgtaaatcttttgaacataatcccagccatgaaggacgtgtattggggtaaagatgtcactcagaagaacaaggaagaaggctacactcacattgttgaggtcaccttcgaaagcgttgaaaccatccaatcttacattatccaccccgctcatgttggtttcggtgctaagtatagatcattctgggaaaaattgttgatttttgactactatcctcgtaagtaa

SEQ ID NO: 1272 - DNA, 306 bp, Artificial Sequence
  Synthetic
atggcagtcaagcatctaatcgttttaaaatttaaggatgaaattacggaggctcaaaaagaagaatttttcaagagatacgtaaatcttgttaaccacatcccagccatgaaggacgtgtattggggtaaagatgtcactcagaagaacaaggaagaaggcttcactcacattgttgaggtcaccttcgaaagcgttgaaaccatcgctgactacattatccaccccgctcatgttgctttcggtaaaaaggccagatcattctgggaaaaattgttgatttttgactactatcctcgtaagtaa

SEQ ID NO: 1273 - DNA, 306 bp, Artificial Sequence
  Synthetic
atggcagtcaagcatctaatcgttttaaaatttaaggatgaaattacgaacgaccaaaaagaagaatttttcaagacatacgtaaatcttctgaacataatcccagccatgaaggacgtgtattggggtaaagatgtcactcagaagaacaaggaagaaggctacactcacattgttgaggtcaccttcgaaagcgttgaaaccatccaatcatacattatccaccccgctcatgttggtttcggtaaaaagtatagatcattctgggaaaaattgttgatttttgactacactcctcgtaagtaa

SEQ ID NO: 1274 - DNA, 306 bp, Artificial Sequence
  Synthetic
atggcagtcaagcatctaatcgttttaaaatttaaggatgaaattacggaggctcaaaaagaagaatttttcaagacatacgtaaatcttgttaacataatcccagccatgaagggtgtgtattggggtaaagatgtcactcagaagaacaaggaagaaggctacactcacattgttgaggtcaccttcgacaatgttgaaaccatccaagactacattatccaccccgctcatgttggtttcggtgaaaagtatagatcattctgggaaaaattgttgatttttgactacaagcctcgtaagtaa

SEQ ID NO: 1275 - DNA, 306 bp, Artificial Sequence
  Synthetic
atggcagtcaagcatctaatcgttttaaaatttaaggatgaaattacgaatgaccaaaaagaagaatttttcaagacatacgtaaatcttttgaacaacatcccagccatgaaggacgtgtattggggtaaagatgtcactcagaagaacaaggaagaaggctacactcacattgttgaggtcaccttcgaaaatgttgaaaccatccaaagctacattatccaccccgctcatgttggtttcggtgataagtatagatcattctgggaaaaattgttgatttttgactacactcctcgtaagtaa

SEQ ID NO: 1276 - DNA, 306 bp, Artificial Sequence
  Synthetic
atggcagtcaagcatctaatcgttttaaaatttaaggatgaaattacggaggaccaaaaagaaaagtttttcaagagatacgtaaatcttgttaacaggatcccagccatgaaggacgtgtattggggtaaagatgtcactcagaagaacaagcacgaaggcttcactcacattgttgaggtcaccttcgaaagcgttgaaaccatcgctgactacattatccaccccgctcatgttgctttccgtaataaatatagatcattctgggaaaaattgttgatttttgactacactcctcgtaagtaa

SEQ ID NO: 1277 - DNA, 306 bp, Artificial Sequence
  Synthetic
atggcagtcaagcatctaatcgttttaaaatttaaggatgaaattacgaatgctcaaaaagaagaatttttcaagacatacgtaaatcttttgaacaacatcccagccatgaaggacgtgtattggggtaaagatgtcactcagaagaacaaggaagaaggctacactcacattgttgaggtcaccttcgaaagctatgaaaccatccaatcctacattatccaccccgctcatgttggtttcagagatttctatagatcattctgggaaaaattgttgatttttgactacactcctcgtaagtaa

SEQ ID NO: 1278 - DNA, 306 bp, Artificial Sequence
  Synthetic
atggcagtcaagcatctaatcgttttaaaatttaaggatgaaattacggaggctcaaaaagaagaatttttcaagagatacgtaaatcttgttaacataatcccagccatgaagggcgtgtattggggtaaagatgtcactcagaagaacaaggaagaaggctacactcacattgttgaggtcaccttcgacaacgttgaaaccatccaagactacattatccaccccgctcatgttggtttcggtgaaaagtatagatcattctgggaaaaattgttgatttttgactacactcctcgtaagtaa

SEQ ID NO: 1279 - DNA, 306 bp, Artificial Sequence
  Synthetic
atggcagtcaagcatctaatcgttttaaaatttaaggatgaaattacggaggctcaaaaagaagaatttttcaagagatacgtaaatcttgttaaccacatcccagccatgaaggacgtgtattggggtaaagatgtcactcagaagaacaaggaagaaggcttcactcacattgttgaggtcaccttcgaaagcgttgaaaccatcgctgactacattggtcaccccgctcatgttgccttcggtaaaaaggctagatcattctgggaaaaattgttgatttttgactacactcctcgtaagtaa

SEQ ID NO: 1280 - DNA, 306 bp, Artificial Sequence
  Synthetic
atggcagtcaagcatctaatcgttttaaaatttaaggatgaaattacgaacgaccaaaaagaagaatttttcaagacatacgtaaatcttttgaacataatcccagccatgaaggacgtgtattggggtaaagatgtcactcagaagaacaaggaagaaggctacactcacattgttgaggtcaccttcgatagcgttgaaaccatccaatcttacattatccaccccgctcatgttggtttcggtgccaagtatagatcattctgggaaaaattgttgatttttgactacactcctcgtaagtaa

SEQ ID NO: 1281 - DNA, 306 bp, Artificial Sequence
  Synthetic
atggcagtcaagcatctaatcgttttaaaatttaaggatgaaattacgaacgaccaaaaagaagaatttttcaagacatacgtaaatcttctgaacaacatcccagccatgaaggacgtgtattggggtaaagatgtcactcagaagaacaaggaagaaggctacactcacattgttgaggtcaccttcgaaagctatgaaaccatccaagagtacattatccaccccgctcatgttggtttcggtgatttttatagatcattctgggaaaaattgttgatttttgactacactcctcgtaagtaa

SEQ ID NO: 1282 - DNA, 306 bp, Artificial Sequence
  Synthetic
atggcagtcaagcatctaatcgttttaaaatttaaggatgaaattacggaggctcaaaaagaagaatttttcaagaggtacgtaaatcttgttaaccacatcccagccatgaaggacgtgtattggggtaaagatgtcactcagaagaacaaggaagaaggcttcactcacattgttgaggtcaccttcgaaaatgttgaaaccatcgctgactacattggtcaccccgctcatgttgctttcggtaaggtcgcaagatcattctgggaaaaattgttgatttttgactacactcctcgtaagtaa

SEQ ID NO: 1283 - DNA, 306 bp, Artificial Sequence
  Synthetic
atggcagtcaagcatctaatcgttttaaaatttaaggatgaaattacggaggctcaaaaagaaaagtttttcaagacatacgtaaatcttgttaacataatcccagccatgaaggacgtgtattggggtaaagatgtcactcagaagaacaaggaagaaggctacactcacattgttgagagtaccttcgaaagctatgaaaccatccaagaatacattatccaccccgctcatgttggtttcggtaaagtctatagatcattctgggaaaaattgttgatttttgactacaagcctcgtaagtaa

SEQ ID NO: 1284 - DNA, 306 bp, Artificial Sequence
  Synthetic
atggcagtcaagcatctaatcgttttaaaatttaaggatgaaattacgaacgctcaaaaagaagaatttttcaagacatacgtaaatcttttgaacataatcccagccatgaaggacgtgtattggggtaaagatgtcactcagaagaacaaggaagaaggctacactcacattgttgaggtcaccttcgaaagcgttgaaaccatccaatcatacattatccaccccgctcatgttggtttcggtgctaaattcagatcattctgggaaaaattgttgatttttgactacactcctcgtaagtaa

SEQ ID NO: 1285 - DNA, 306 bp, Artificial Sequence
  Synthetic
atggcagtcaagcatctaatcgttttaaaatttaaggatgaaattacgaacgaccaaaaagaagaatttttcaagacatacgtaaatcttctgaacaatatcccagccatgaaggacgtgtattggggtaaagatgtcactcagaagaacaaggaagaaggctacactcacattgttgaggtcaccttcgaaagcgttgaaaccatccaatcctacattatccaccccgctcatgttggtttcagagatttctatagatcattctgggaaaaattgttgatttttgactacactcctcgtaagtaa

SEQ ID NO: 1286 - DNA, 306 bp, Artificial Sequence
  Synthetic
atggcagtcaagcatctaatcgttttaaaatttaaggatgaaattacgaacgctcaaaaagaaaagtttttcaagacatacgtaaatcttctgaacataatcccagccatgaaggacgtgtattggggtaaagatgtcactcagaagaacaaggaagaaggctacactcacattgttgaggtcaccttcgaaagcgttgaaaccatccaagagtacattatccaccccgctcatgttggtttcggtgctttctatagatcattctgggaaaaattgttgatttttgactacactcctcgtaagtaa

SEQ ID NO: 1287 - DNA, 306 bp, Artificial Sequence
  Synthetic
atggcagtcaagcatctaatcgttttaaaatttaaggatgaaattacgaacgaccaaaaagaagaatttttcaagacatacgtaaatcttttgaacaatatcccagccatgaaggacgtgtattggggtaaagatgtcactcagaagaacaaggaagaaggctacactcacattgttgaggtcaccttcgaaagcgttgaaaccatccaaagttacattggacaccccgctcatgttggtttcggtaaattctatagatcattctgggaaaaattgttgatttttgactacactcctcgtaagtaa

SEQ ID NO: 1288 - DNA, 306 bp, Artificial Sequence
  Synthetic
atggcagtcaagcatctaatcgttttaaaatttaaggatgaaattacgaacgctcaaaaagaagaatttttcaagacatacgtaaatcttttgaacaacatcccagccatgaaggacgtgtattggggtaaagatgtcactcagaagaacaaggaagaaggctacactcacattgttgaggtcaccttcgacagcgttgaaaccatccaatcatacattatccaccccgctcatgttggtttcggtgatttctatagatcattctgggaaaaattgttgatttttgactacactcctcgtaagtaa

SEQ ID NO: 1289 - DNA, 306 bp, Artificial Sequence
  Synthetic
atggcagtcaagcatctaatcgttttaaaatttaaggatgaaattacgaacgctcaaaaagaagaatttttcaagacatacgtaaatcttctgaacaacatcccagccatgaaggacgtgtattggggtaaagatgtcactcagaagaacaaggaagaaggctacactcacattgttgaggtcaccttcgaaagcgttgaaaccatccaatcctacattatccaccccgctcatgttggtttcggtgataagttcagatcattctgggaaaaattgttgatttttgactacactcctcgtaagtaa

SEQ ID NO: 1290 - DNA, 306 bp, Artificial Sequence
  Synthetic
atggcagtcaagcatctaatcgttttaaaatttaagcgtgaaattacggaggctcaaaaagaagaatttttcaagaggtacgtaaatcttgttaacataatcccagccatgaaggacgtgtattggggtaaagatgtcactcagaagaacaaggaagaaggctacactcacattgttgaggtcaccttcgaaaatgttgaaaccatccaagactacattatccaccccgctcatgttggtttcggtgaaaagtatagatcattctgggaaaaattgttgatttttgactacaagcctcgtaagtaa

SEQ ID NO: 1291 - DNA, 306 bp, Artificial Sequence
  Synthetic
atggcagtcaagcatctaatcgttttaaaatttaaggatgaaattacgaacgctcaaaaagaagaatttttcaagacatacgtaaatcttttgaacaatatcccagccatgaaggacgtgtattggggtaaagatgtcactcagaagaacaaggaagaaggctacactcacattgttgaggtcaccttcgaaagctacgaaaccatccaagaatacattatccaccccgctcatgttggtttcggtgatttctatagatcattctgggaaaaattgttgatttttgactacactcctcgtaagtaa

SEQ ID NO: 1292 - DNA, 306 bp, Artificial Sequence
  Synthetic
atggcagtcaagcatctaatcgttttaaaatttaagcgtgaaattacggaggaccaaaaagaagaatttttcaagacatacgtaagccttgttaacataatcccagccatgaaggacgtgtattggggtaaagatgtcactcagaagaacaaggaagaaggctacactcacattgttgaggtcaccttcgaaagcgttgaaaccatcttgcaatacattatccaccccgctcatgttgctttcggtaaaaagtatagatcattctgggaaaaattgttgatttttgactacactcctcgtaagtaa

SEQ ID NO: 1293 - DNA, 306 bp, Artificial Sequence
  Synthetic
atggcagtcaagcatctaatcgttttaaaatttaagagggaaattacggaggctcaaaaagaagaatttttcaagcgttacgtaaatcttgttaacataatcccagccatgaagggcgtgtattggggtaaagatgtcactcagaagaacaaggaagaaggctacactcacattgttgaggtcaccttcgaaagcgttgaaaccatccaagactacattatccaccccgctcatgttggtttcggtgaaaagtatagatcattctgggaaaaattgttgatttttgactacaagcctcgtaagtaa

SEQ ID NO: 1294 - DNA, 306 bp, Artificial Sequence
  Synthetic
atggcagtcaagcatctaatcgttttaaaatttaagcgtgaaattacggaggaccaaaaagaagaatttttcaagagatacgtaaatcttgttaacataatcccagccatgaaggacgtgtattggggtaaagatgtcactcagaagaacaagcacgaaggcttcactcacattgttgaggtcaccttcgatagcgttgaaaccatcgctgactacattatccaccccgctcatgttgctttcggtaacaaatatagatcattctgggaaaaattgttgatttttgactacactcctcgtaagtaa

SEQ ID NO: 1295 - DNA, 306 bp, Artificial Sequence
  Synthetic
atggcagtcaagcatctaatcgttttaaaatttaaggatgaaattacgaatgaccaaaaagaagaatttttcaagacatacgtaaatcttttgaacaacatcccagccatgaaggacgtgtattggggtaaagatgtcactcagaagaacaaggaagaaggctacactcacattgttgaggtcaccttcgaaagcgttgaaaccatccaatcgtacattatccaccccgctcatgttggtttcggtgataagtatagatcattctgggaaaaattgttgatttttgactacactcctcgtaagtaa

SEQ ID NO: 1296 - DNA, 306 bp, Artificial Sequence
  Synthetic
atggcagtcaagcatctaatcgttttaaaatttaagcgtgaaattacggaggaccaaaaagaagaatttttcaagacatacgtaagccttgttaacataatcccagccatgaagggagtgtattggggtaaagatgtcactcagaagaacaaggaagaaggctacactcacattgttgaggtcaccttcgaaaatgttgaaaccatcttgcaatacattatccaccccgctcatgttgctttcggtaaggtctatagatcattctgggaaaaattgttgatttttgactacactcctcgtaagtaa

SEQ ID NO: 1297 - DNA, 306 bp, Artificial Sequence
  Synthetic
atggcagtcaagcatctaatcgttttaaaatttaaggatgaaattacgaatgaccaaaaagaagaatttttcaagacatacgtaaatcttttgaacaacatcccagccatgaaggacgtgtattggggtaaagatgtcactcagaagaacaaggaagaaggctacactcacattgttgaggtcaccttcgaaagctatgaaaccatccaaagttacattatccaccccgctcatgttggtttcggtgatttctatagatcattctgggaaaaattgttgatttttgactacactcctcgtaagtaa

SEQ ID NO: 1298 - DNA, 306 bp, Artificial Sequence
  Synthetic
atggcagtcaagcatctaatcgttttaaaatttaaggatgaaattacgaatgctcaaaaagaagaatttttcaagacatacgtaaatcttttgaacaacatcccagccatgaaggacgtgtattggggtaaagatgtcactcagaagaacaaggaagaaggctacactcacattgttgaggtcaccttcgaaagcgttgaaaccatccaatcctacattatccaccccgctcatgttggtttcggtaaattttatagatcattctgggaaaaattgttgatttttgactactaccctcgtaagtaa

SEQ ID NO: 1299 - DNA, 306 bp, Artificial Sequence
  Synthetic
atggcagtcaagcatctaatcgttttaaaatttaaggatgaaattacggaggaccaaaaagaagaatttttcaagaggtacgtaaatcttgttaaccacatcccagccatgaaggacgtgtattggggtaaagatgtcactcagaagaacaaggaagaaggcttcactcacattgttgaggtcaccttcgacagcgttgaaaccatcgctgactacattatccaccccgctcatgttgctttcggtaaggtcgccagatcattctgggaaaaattgttgatttttgactacactcctcgtaagtaa

SEQ ID NO: 1300 - DNA, 306 bp, Artificial Sequence
  Synthetic
atggcagtcaagcatctaatcgttttaaaatttaaggatgaaattacgaacgaccaaaaagaagaatttttcaagcgttacgtaaatcttttgaacataatcccagccatgaaggacgtgtattggggtaaagatgtcactcagaagaacaaggaagaaggctacactcacattgttgaggtcaccttcgaaagcgttgaaaccatccaatcatacattatccaccccgctcatgttggtttcggtgctaagtatagatcattctgggaaaaattgttgatttttgactacactcctcgtaagtaa

SEQ ID NO: 1301 - DNA, 306 bp, Artificial Sequence
  Synthetic
atggcagtcaagcatctaatcgttttaaaatttaaggatgaaattacggaggaccaaaaagaagaatttttcaagcgttacgtaaatcttgttaacagaatcccagccatgaaggacgtgtattggggtaaagatgtcactcagaagaacaagcacgaaggcttcactcacattgttgaggtcaccttcgacagcgttgaaaccatcgctgactacattatccaccccgctcatgttgctttcggtaataaatatagatcattctgggaaaaattgttgatttttgactacaagcctcgtaagtaa

SEQ ID NO: 1302 - DNA, 306 bp, Artificial Sequence
  Synthetic
atggcagtcaagcatctaatcgttttaaaatttaaggatgaaattacggaggaccaaaaagaagaatttttcaagcgttacgtaaatcttgttaacagaatcccagccatgaaggacgtgtattggggtaaagatgtcactcagaagaacaagcacgaaggcttcactcacattgttgaggtcaccttcgaaagcgttgaaaccatcgctgactacattatccaccccgctcatgttgctttcggtgaaaaatatagatcattctgggaaaaattgttgatttttgactactaccctcgtaagtaa

SEQ ID NO: 1303 - DNA, 306 bp, Artificial Sequence
  Synthetic
atggcagtcaagcatctaatcgttttaaaatttaaggatgaaattacgaatgctcaaaaagaagaatttttcaagagatacgtaaatcttttgaacataatcccagccatgaaggacgtgtattggggtaaagatgtcactcagaagaacaaggaagaaggctacactcacattgttgaggtcaccttcgaaagcgttgaaaccatccaatcatacattatccaccccgctcatgttggtttcggtgctaagtatagatcattctgggaaaaattgttgatttttgactacactcctcgtaagtaa

SEQ ID NO: 1304 - DNA, 306 bp, Artificial Sequence
  Synthetic
atggcagtcaagcatctaatcgttttaaaatttaaggatgaaattacggaggaccaaaaagaagaatttttcaagcgttacgtaaatcttgttaacataatcccagccatgaaggacgtgtattggggtaaagatgtcactcagaagaacaagcacgaaggcttcactcacattgttgagtctaccttcgaaagcgttgaaaccatcgctgactacattatccaccccgctcatgttgctttcggtaataagtttagatcattctgggaaaaattgttgatttttgactacactcctcgtaagtaa

SEQ ID NO: 1305 - DNA, 306 bp, Artificial Sequence
  Synthetic
atggcagtcaagcatctaatcgttttaaaatttaaggatgaaattacggaggctcaaaaagaagaatttttcaagaggtacgtaaatcttgttaaccacatcccagccatgaaggacgtgtattggggtaaagatgtcactcagaagaacaaggaagaaggcttcactcacattgttgaggtcaccttcgacaatgttgaaaccatcgctgactacattatccaccccgctcatgttgccttcggtaaggtctatagatcattctgggaaaaattgttgatttttgactacactcctcgtaagtaa

SEQ ID NO: 1306 - DNA, 306 bp, Artificial Sequence
  Synthetic
atggcagtcaagcatctaatcgttttaaaatttaagagagaaattacggaggatcaaaaagaagaatttttcaagacatacgtatctcttgttaacataatcccagccatgaagggagtgtattggggtaaagatgtcactcagaagaacaaggaagaaggctacactcacattgttgaggtcaccttcgaaagcgttgaaaccatcttggactacattatccaccccgctcatgttgctttcggtaaggtcttcagatcattctgggaaaaattgttgatttttgactacactcctcgtaagtaa

SEQ ID NO: 1307 - DNA, 306 bp, Artificial Sequence
  Synthetic
atggcagtcaagcatctaatcgttttaaaatttaaggatgaaattacggaggaccaaaaagaagaatttttcaagagatacgtaaatcttgttaaccacatcccagccatgaaggacgtgtattggggtaaagatgtcactcagaagaacaaggaagaaggcttcactcacattgttgaggtcaccttcgaaaatgttgaaaccatcgctgactacattatccaccccgctcatgttgctttcggtaaggtcgccagatcattctgggaaaaattgttgatttttgactacactcctcgtaagtaa

SEQ ID NO: 1308 - DNA, 306 bp, Artificial Sequence
  Synthetic
atggcagtcaagcatctaatcgttttaaaatttaaggatgaaattacggaggctcaaaaagaagaatttttcaagaggtacgtaaatcttgttaaccacatcccagccatgaaggacgtgtattggggtaaagatgtcactcagaagaacaaggaagaaggcttcactcacattgttgaggtcaccttcgaaaatgttgaaaccatcgctgactacattatccaccccgctcatgttgccttcggtgaagtcgctagatcattctgggaaaaattgttgatttttgactacactcctcgtaagtaa

SEQ ID NO: 1309 - DNA, 306 bp, Artificial Sequence
  Synthetic
atggcagtcaagcatctaatcgttttaaaatttaaggatgaaattacgaacgaccaaaaagaagaatttttcaagacatacgtaaatcttttgaacataatcccagccatgaaggacgtgtattggggtaaagatgtcactcagaagaacaaggaagaaggctacactcacattgttgaggtcaccttcgatagcgttgaaaccatccaatcatacattatccaccccgctcatgttggtttcggtaaattctatagatcattctgggaaaaattgttgatttttgactacactcctcgtaagtaa

SEQ ID NO: 1310 - DNA, 306 bp, Artificial Sequence
  Synthetic
atggcagtcaagcatctaatcgttttaaaatttaaggatgaaattacggaggaccaaaaagaagaatttttcaagagatacgtaaatcttgttaaccacatcccagccatgaaggacgtgtattggggtaaagatgtcactcagaagaacaaggaagaaggcttcactcacattgttgaggtcaccttcgaaagcgttgaaaccatcgctgactacattatccaccccgctcatgttgctttcggtaaagtctatagatcattctgggaaaaattgttgatttttgactacaagcctcgtaagtaa

SEQ ID NO: 1311 - DNA, 306 bp, Artificial Sequence
  Synthetic
atggcagtcaagcatctaatcgttttaaaatttaaggatgaaattacggaggaccaaaaagaagaatttttcaagagatacgtaaatcttgttaaccgtatcccagccatgaagggtgtgtattggggtaaagatgtcactcagaagaacaagcacgaaggcttcactcacattgttgaggtcaccttcgaaagcgttgaaaccatcgctgactacattatccaccccgctcatgttgctttcggtgaaaaatatagatcattctgggaaaaattgttgatttttgactacactcctcgtaagtaa

SEQ ID NO: 1312 - DNA, 306 bp, Artificial Sequence
  Synthetic
atggcagtcaagcatctaatcgttttaaaatttaaggatgaaattacgaacgctcaaaaagaagaatttttcaagacatacgtaaatcttctgaacataatcccagccatgaaggacgtgtattggggtaaagatgtcactcagaagaacaaggaagaaggctacactcacattgttgaggtcaccttcgacagcgttgaaaccatccaatcgtacattatccaccccgctcatgttggtttcggtgctaaatatagatcattctgggaaaaattgttgatttttgactacactcctcgtaagtaa

SEQ ID NO: 1313 - DNA, 306 bp, Artificial Sequence
  Synthetic
atggcagtcaagcatctaatcgttttaaaatttaagagggaaattacggaggctcaaaaagaaaagtttttcaagacatacgtaaatcttgttaacataatcccagccatgaaggacgtgtattggggtaaagatgtcactcagaagaacaaggaagaaggctacactcacattgttgaggtcaccttcgaaagctatgaaaccatccaagaatacattatccaccccgctcatgttggtttcagagatgtctatagatcattctgggaaaaattgttgatttttgactacaagcctcgtaagtaa

SEQ ID NO: 1314 - DNA, 306 bp, Artificial Sequence
  Synthetic
atggcagtcaagcatctaatcgttttaaaatttaagcgtgaaattacgaatgaccaaaaagaagaatttttcaagacatacgtaaatcttttgaacaacatcccagccatgaaggacgtgtattggggtaaagatgtcactcagaagaacaaggaagaaggctacactcacattgttgaggtcaccttcgaaagcgttgaaaccatccaatcctacattatccaccccgctcatgttggtttcggtgataaatatagatcattctgggaaaaattgttgatttttgactacactcctcgtaagtaa

SEQ ID NO: 1315 - DNA, 306 bp, Artificial Sequence
  Synthetic
atggcagtcaagcatctaatcgttttaaaatttaaggatgaaattacgaacgctcaaaaagaagaatttttcaagacatacgtaaatcttctgaacaacatcccagccatgaaggacgtgtattggggtaaagatgtcactcagaagaacaaggaagaaggctacactcacattgttgaggtcaccttcgaaagcgttgaaaccatccaatcgtacattatccaccccgctcatgttggtttcggtgaaaagtatagatcattctgggaaaaattgttgatttttgactacactcctcgtaagtaa

SEQ ID NO: 1316 - DNA, 1173 bp, Artificial Sequence
  Synthetic
atgcccagtttagagtcagttaagaaatccaatcgtgccgacggcttcgcatcgattctggctataggtagagctaaccctgaaaactttatcgaacagtctacatatccagatttctttttcagagtcaccaatagcgaacaccttgtaaacctaaagaaaaagttccaaagaatttgcgacaagactgctatcaggaagcgtcattttgtgtggaacgaagaattgttgaatgccaacccatgtttgggtacgtttatggataactcattaaacgtcagacaagaatttgctattagagagattccaaaactaggtgctgaagctgccactaaggcaatccaagaatggggtcaaccaaagtccagaataacccacttgatcttctgtactacctctggaatggatttgccaggtgctgactaccaattgacccaaattctgggtttgaatcctaatattgagagggttatgttataccagcaaggttgtttcgctggtggtactactttgagattggccaaatgtttagccgaatctcgtaagggagctagagttttggttgtctgtgctgaaacaaccgctgttctattcagagcaccttccgaagaacatcaagatgatttagtaactcaagctttgttcgccgacggtgcttctgctcttatcgttggtgcagacccagacgagactgcccacgaaagagctagttttgttattgtctctacatctcaagtcttgttaccagatagcgctggtgctatcggcggtcatgtgtccgaaggtggtttgatcgccactttgcacagagatgttccacagatagttagcaaaaatgtcggtaagtgcttggaagaagcattcacccccttgggtattagtgattggaacagtattttttgggttccacacccaggaggtagagctattcttgaccaagtggaagaaagagtcggtttaaagcctgagaagttgatcgtatccagacatgtgttagccgaatatggcaacatgtcttctgtttgtgttcactttgctctggatgaaatgaggaagagatctaaaaaagaaggtaaggctacaaccggtgagggtttagactggggtgttttgttcggcttcggtccaggattaactgtcgaaaccgtcgttttgcactctgttccaatataa
